(19) United States
(12) Patent Application Publication
(10) Pub. No.: US 2006/0252922 A1
(43) Pub. Date: Nov. 9, 2006

(54) Compositions, splice variants and methods relating to colon specific genes and proteins

(76) Inventors: Roberto A Macina, San Jose, CA (US); Leah R. Turner, Sunnyvale, CA (US); Yongming Sun, Redwood City, CA (US); Maria Rodriquez, Minneapolis, MN (US); Timothy S. Burcham, Castro Valley, CA (US)

Correspondence Address: LICATA & TYRRELL P.C., 66 E. MAIN STREET, MARLTON, NJ, 08053, US

(21) Appl. No.: 10/538,002

(22) PCT Filed: Dec. 4, 2003
(86) PCT No.: PCT/US03/38808

§ 371 Date: Jun. 13, 2006

Related U.S. Application Data
(60) Provisional application No. 60/431,133, filed on Dec. 4, 2002.

(51) Int. Cl. C12Q 1/68; C07H 21/04; C12P 21/06; C12N 15/09; C12N 5/06; C07K 14/705

(52) U.S. Cl. 536/23.5; 435/6; 435/69.1; 435/320.1; 435/325; 530/350

(57) ABSTRACT

The present invention relates to newly identified nucleic acid molecules and polypeptides present in normal and neoplastic colon cells, including fragments, variants and derivatives of the nucleic acids and polypeptides. The present invention also relates to antibodies to the polypeptides of the invention, as well as agonists and antagonists of the polypeptides of the invention. The invention also relates to compositions containing the nucleic acid molecules, polypeptides, antibodies, agonists and antagonists of the invention and methods for the use of these compositions. These uses include identifying, diagnosing, monitoring, staging, imaging and treating colon cancer and non-cancerous disease states in colon, identifying colon tissue, monitoring and identifying and/or designing agonists and antagonists of polypeptides of the invention. The uses also include gene therapy, production of transgenic animals and cells, and production of engineered colon tissue for treatment and research.

### INTRODUCTION

[0001] This application claims the benefit of priority from U.S. Provisional Patent Application Serial No. 60/431,133 filed December 4, 2002, which is herein incorporated by reference in its entirety.

### FIELD OF THE INVENTION

[0002] The present invention relates to newly identified nucleic acids and polypeptides present in normal and neoplastic colon cells, including fragments, variants and derivatives of the nucleic acids and polypeptides. The present invention also relates to antibodies to the polypeptides of the invention, as well as agonists and antagonists of the polypeptides of the invention. The invention also relates to compositions comprising the nucleic acids, polypeptides, antibodies, post translational modifications (PTMs), variants, derivatives, agonists and antagonists thereof and methods for the use of these compositions. These uses include identifying, diagnosing, monitoring, staging, imaging and treating colon cancer and/or non-cancerous disease states in colon, identifying colon tissue and monitoring and identifying and/or designing agonists and antagonists of polypeptides of the invention. The uses also include gene therapy, therapeutic molecules including but not limited to antibodies or antisense molecules, production of transgenic animals and cells, and production of engineered colon tissue for treatment and research.

### BACKGROUND OF THE INVENTION

[0003] Colorectal cancer is the second most common cause of cancer death in the United States and the third most prevalent cancer in both men and women. M. L. Davila & A. D. Davila, Screening for Colon and Rectal Cancer, in Colon and Rectal Cancer 47 (Peter S. Edelstein ed., 2000). The American Cancer Society estimates that there will be about 105,500 new cases of colon cancer and 42,000 new cases of rectal cancer in 2003 in the United States. Colon cancer and rectal cancer will cause about 57,100 deaths combined. ACS Website: cancer.org on the world wide web. Nearly all cases of colorectal cancer arise from adenomatous polyps, some of which mature into large polyps, undergo abnormal growth and development, and ultimately progress into cancer. Davila at 55-56. This progression would appear to take at least 10 years in most patients, rendering it a readily treatable form of cancer if diagnosed early, when the cancer is localized. Davila at 56; Walter J. Burdette, Cancer: Etiology, Diagnosis, and Treatment 125 (1998).

[0004] Although our understanding of the etiology of colon cancer is undergoing continual refinement, extensive research in this area points to a combination of factors, including age, hereditary and nonhereditary conditions, and environmental/dietary factors. Age is a key risk factor in the development of colorectal cancer, Davila at 48, with men and women over 40 years of age becoming increasingly susceptible to that cancer, Burdette at 126. Incidence rates increase considerably in each subsequent decade of life. Davila at 48. A number of hereditary and nonhereditary conditions have also been linked to a heightened risk of developing colorectal cancer, including familial adenomatous polyposis (FAP), hereditary nonpolyposis colorectal cancer (Lynch syndrome or HNPCC), a personal and/or family history of colorectal cancer or adenomatous polyps, inflammatory bowel disease, diabetes mellitus, and obesity. Davila at 47; Henry T. Lynch & Jane F. Lynch, Hereditary Nonpolyposis Colorectal Cancer (Lynch Syndromes), in Colon and Rectal Cancer 67-68 (Peter S. Edelstein ed., 2000).

[0005] Environmental/dietary factors associated with an increased risk of colorectal cancer include a high fat diet, intake. of high dietary red meat, and sedentary lifestyle. Davila at 47; Reddy, B. S., Prev. Med. 16(4): 460-7 (1987). Conversely, environmental/dietary factors associated with a reduced risk of colorectal cancer include a diet high in fiber, folic acid, calcium, and hormone-replacement therapy in post-menopausal women. Davila at 50-55. The effect of antioxidants in reducing the risk of colon cancer is unclear. Davila at 53.

[0006] Because colon cancer is highly treatable when detected at an early, localized stage, screening should be a part of routine care for all adults starting at age 50, especially those with first-degree relatives with colorectal cancer. One major advantage of colorectal cancer screening over its counterparts in other types of cancer is its ability to not only detect precancerous lesions, but to remove them as well. Davila at 56. The key colorectal cancer screening tests in use today are fecal occult blood test, sigmoidoscopy, colonoscopy, double-contrast barium enema, and the carcinoembryonic antigen (CEA) test. Burdette at 125; Davila at 56.

[0007] The fecal occult blood test (FOBT) screens for colorectal cancer by detecting the amount of blood in the stool, the premise being that neoplastic tissue, particularly malignant tissue, bleeds more than typical mucosa, with the amount of bleeding increasing with polyp size and cancer stage. Davila at 56-57. While effective at detecting early stage tumors, FOBT is unable to detect adenomatous polyps (premalignant lesions), and, depending on the contents of the fecal sample, is subject to rendering false positives. Davila at 56-59. Sigmoidoscopy and colonoscopy, by contrast, allow direct visualization of the bowel, and enable one to detect, biopsy, and remove adenomatous polyps. Davila at 59-60, 61. Despite the advantages of these procedures, there are accompanying downsides: sigmoidoscopy, by definition, is limited to the sigmoid colon and below, colonoscopy is a relatively expensive procedure, and both share the risk of possible bowel perforation and hemorrhaging. Davila at 59-60. Double-contrast barium enema (DCBE) enables detection of lesions better than FOBT, and almost as well a colonoscopy, but it may be limited in evaluating the winding rectosigmoid region. Davila at 60. The CEA blood test, which involves screening the blood for carcinoembryonic antigen, shares the downside of FOBT, in that it is of limited utility in detecting colorectal cancer at an early stage. Burdette at 125.

[0008] Once colon cancer has been diagnosed, treatment decisions are typically made in reference to the stage of cancer progression. A number of techniques are employed to stage the cancer (some of which are also used to screen for colon cancer), including pathologic examination of resected colon, sigmoidoscopy, colonoscopy, and various imaging techniques. AJCC Cancer Staging Handbook 84 (Irvin D. Fleming et al. eds., 5^{th} ed. 1998); Montgomery, R. C. and Ridge, J. A., Semin. Surg. Oncol. 15(3): 143-150 (1998). Moreover, chest films, liver functionality tests, and liver scans are employed to determine the extent of metastasis. Fleming at 84. While computerized tomography and magnetic resonance imaging are useful in staging colorectal cancer in its later stages, both have unacceptably low staging accuracy for identifying early stages of the disease, due to the difficulty that both methods have in (1) revealing the depth of bowel wall tumor infiltration and (2) diagnosing malignant adenopathy. Thoeni, R. F., Radiol. Clin. N. Am. 35(2): 457-85 (1997). Rather, techniques such as transrectal ultrasound (TRUS) are preferred in this context, although this technique is inaccurate with respect to detecting small lymph nodes that may contain metastases. David Blumberg & Frank G. Opelka, Neoadjuvant and Adjuvant Therapy for Adenocarcinoma of the Rectum, in Colon and Rectal Cancer 316 (Peter S. Edelstein ed., 2000).

[0009] Several classification systems have been devised to stage the extent of colorectal cancer, including the Dukes' system and the more detailed International Union against Cancer-American Joint Committee on Cancer TNM staging system, which is considered by many in the field to be a more useful staging system. Burdette at 126-27. The TNM system, which is used for either clinical or pathological staging, is divided into four stages, each of which evaluates the extent of cancer growth with respect to primary tumor (T), regional lymph nodes (N), and distant metastasis (M). Fleming at 84-85. The system focuses on the extent of tumor invasion into the intestinal wall, invasion of adjacent structures, the number of regional lymph nodes that have been affected, and whether distant metastasis has occurred. Fleming at 81.

[0010] Stage 0 is characterized by in situ carcinoma (Tis), in which the cancer cells are located inside the glandular basement membrane (intraepithelial) or lamina propria (intramucosal). In this stage, the cancer has not spread to the regional lymph nodes (N0), and there is no distant metastasis (M0). In stage I, there is still no spread of the cancer to the regional lymph nodes and no distant metastasis, but the tumor has invaded the submucosa (T1) or has progressed further to invade the muscularis propria (T2). Stage II also involves no spread of the cancer to the regional lymph nodes and no distant metastasis, but the tumor has invaded the subserosa, or the nonperitonealized pericolic or perirectal tissues (T3), or has progressed to invade other organs or structures, and/or has perforated the visceral peritoneum (T4). Stage III is characterized by any of the T substages, no distant metastasis, and either metastasis in 1 to 3 regional lymph nodes (N1) or metastasis in four or more regional lymph nodes (N2). Lastly, stage IV involves any of the T or N substages, as well as distant metastasis. Fleming at 84-85; Burdette at 127.

[0011] Currently, pathological staging of colon cancer is preferable over clinical staging as pathological staging provides a more accurate prognosis. Pathological staging typically involves examination of the resected colon section, along with surgical examination of the abdominal cavity. Fleming at 84. Clinical staging would be a preferred method of staging were it at least as accurate as pathological staging, as it does not depend on the invasive procedures of its counterpart.

[0012] Turning to the treatment of colorectal cancer, surgical resection results in a cure for roughly 50% of patients. Irradiation is used both preoperatively and postoperatively in treating colorectal cancer. Chemotherapeutic agents, particularly 5-fluorouracil, are also powerful weapons in treating colorectal cancer. Other agents include irinotecan and floxuridine, cisplatin, levamisole, methotrexate, interferon-α, and leucovorin. Burdette at 125, 132-33. Nonetheless, thirty to forty percent of patients will develop a recurrence of colon cancer following surgical resection, which in many patients is the ultimate cause of death. Wayne De Vos, Follow-up After Treatment of Colon Cancer, Colon and Rectal Cancer 225 (Peter S. Edelstein ed., 2000). Accordingly, colon cancer patients must be closely monitored to determine response to therapy and to detect persistent or recurrent disease and metastasis.

[0013] The next few paragraphs describe the some of molecular bases of colon cancer. In the case of FAP, the tumor suppressor gene APC (adenomatous polyposis coli), chromosomally located at 5q21, has been either inactivated or deleted by mutation.

[0014] Alberts et al., Molecular Biology of the Cell 1288 (3d ed. 1994). The APC protein plays a role in a number of functions, including cell adhesion, apoptosis, and repression of the c-myc oncogene. N. R. Hall & P. D. Madoff, Genetics and the Polyp-Cancer Sequence, Colon and Rectal Cancer 8 (Peter S. Edelstein, ed., 2000). Of those patients with colorectal cancer who have normal APC genes, over 65% have such mutations in the cancer cells but not in other tissues. Alberts et al., supra at 1288. In the case of HPNCC, patients manifest abnormalities in the tumor suppressor gene HNPCC, but only about 15% of tumors contain the mutated gene. Id. A host of other genes have also been implicated in colorectal cancer, including the K-ras, N-ras, H-ras and c-myc oncogenes, and the tumor suppressor genes DCC (deleted in colon carcinoma) and p53. Hall & Madoff, at 8-9; Alberts et al., at 1288.

[0015] Abnormalities in Wg/Wnt signal transduction pathway are also associated with the development of colorectal carcinoma. Taipale, J. and Beachy, P. A. Nature 411: 349-354 (2001). Wnt1 is a secreted protein gene originally identified within mouse mammary cancers by its insertion into the mouse mammary tumor virus (MMTV) gene. The protein is homologous to the wingless (Wg) gene product of Drosophila, in which it functions as an important factor for the determination of dorsal-ventral segmentation and regulates the formation of fly imaginal discs. Wg/Wnt pathway controls cell proliferation, death and differentiation. Taipal (2001). There are at least 13 members in the Wnt family. These proteins have been found expressed mainly in the central nervous system (CNS) of vertebrates as well as other tissues such as mammary and intestine. The Wnt proteins are the ligands for a family of seven transmembrane domain receptors related to the Frizzled gene product in Drosophila. Binding Wnt to Frizzled stimulates the activity of the downstream target, Dishevelled, which in turn inactivates the glycogen synthesase kinase 3β (GSK3β). Taipal (2001). Usually active GSK3β will form a complex with the adenomatous polyposis coil (APC) protein and phosphorylate another complex member, β-catenin. Once phosphorylated, β-catenin is directed to degradation through the ubiquitin pathway. When GSK3β or APC activity is down regulated, β-catenin is accumulated in the cytoplasm and binds to the T-ell factor or lymphocyte excitation factor (Tcf/Lef) family of transcriptional factors. Binding of β-catenin to Tcf releases the transcriptional repression and induces gene transcription. Among the genes regulated by β-catenin are a transcriptional repressor Engrailed, a transforming growth factor-β, (TGF-β) family member Decapentaplegic, and the cytokine Hedgehog in Drosophila. β-Catenin is also involved in regulating cell adhesion by binding to α-catenin and E-cadherin. On the other hand, binding of β-catenin to these proteins controls the cytoplasmic β-catenin level and its complexing with TCF. Taipal (2001). Growth factor stimulation and activation of c-src or v-src also regulate β-catenin level by phosphorylation of α-catenin and its related protein, p120^{cas}. When phosphorylated, these proteins decrease their binding to E-cadherin and β-catenin resulting in the accumulation of cytoplasmic β-catenin. Reynolds, A. B. et al. Mol. Cell Biol. 14: 8333-8342 (1994). In colon cancer, c-src enzymatic activity has been shown to be increased to the level of v-src. Alternation of components in the Wg/Wnt pathway promotes colorectal carcinoma development. The best known modifications are to the APC gene. Nicola S et al. Hum. Mol. Genet 10:721-733 (2001). This germline mutation causes the appearance of hundreds to thousands of adenomatous polyps in the large bowel. It is the gene defect that accounts for the autosomally dominantly inherited FAP and related syndromes. The molecular alternations that occur in this pathway largely involve deletions of alleles of tumor-suppressor genes, such as APC, p53 and Deleted in Colorectal Cancer (DCC), combined with mutational activation of proto-oncogenes, especially c-Ki-ras. Aoki, T. et al. Human Mutat. 3: 342-346 (1994). All of these lead to genomic instability in colorectal cancers.

[0016] Another source of genomic instability in colorectal cancer is the defect of DNA mismatch repair (MMR) genes. Human homologues of the bacterial mutHLS complex (hMSH2, hMLH1, hPMS1, hPMS2 and hMSH6), which is involved in the DNA mismatch repair in bacteria, have been shown to cause the HNPCC (about 70-90% HNPCC) when mutated. Modrich, P. and Lahue, R. Ann Rev. Biochem. 65: 101-133 (1996); and Peltomäki, P. Hum. Mol. Genet 10: 735-740 (2001). The inactivation of these proteins leads to the accumulation of mutations and causes genetic instability that represents errors in the accurate replication of the repetitive mono-, di-, tri- and tetra-nucleotide repeats, which are scattered throughout the genome (microsatellite regions). Jass, J. R. et al. J. Gastroenterol Hepatol 17: 17-26 (2002). Like in the classic FAP, mutational activation of c-Ki-ras is also required for the promotion of MSI in the alternative HNPCC. Mutations in other proteins such as the tumor suppressor protein phosphatase PTEN (Zhou, X. P. et al. Hum. Mol. Genet 11: 445-450 (2002)), BAX (Buttler, L. M. Aus. N. Z. J. Surg. 69: 88-94 (1999)), Caspase-5 (Planck, M. Cancer Genet Cytogenet. 134: 46-54 (2002)), TGFβ-RII (Fallik, D. et al. Gastroenterol Clin Biol. 24: 917-22 (2000)) and IGFII-R (Giovannucci E. J. Nutr. 131: 3109S-20S (2001)) have also been found in some colorectal tumors possibly as the cause of MMR defect.

[0017] Some tyrosine kinases have been shown up-regulated in colorectal tumor tissues or cell lines like HT29. Skoudy, A. et al. Biochem J. 317 (Pt 1): 279-84 (1996). Focal adhesion kinase (FAK) and its up-stream kinase c-src and c-yes in colonic epithelial cells may play an important role in the promotion of colorectal cancers through the extracellular matrix (ECM) and integrin-mediated signaling pathways. Jessup, J. M. et al., The molecular biology of colorectal carcinoma, in: The Molecular Basis of Human Cancer, 251-268 (Coleman W. B. and Tsongalis G. J. Eds. 2002). The formation of c-src/FAK complexes may coordinately deregulate VEGF expression and apoptosis inhibition. Recent evidences suggest that a specific signal-transduction pathway for cell survival that implicates integrin engagement leads to FAK activation and thus activates PI-3 kinase and akt. In turn, akt phosphorylates BAD and blocks apoptosis in epithelial cells. The activation of c-src in colon cancer may induce VEGF expression through the hypoxia pathway. Other genes that may be implicated in colorectal cancer include Cox enzymes (Ota, S. et al. Aliment Pharmacol. Ther. 16 (Suppl 2): 102-106 (2002)), estrogen (al-Azzawi, F. and Wahab, M. Climacteric 5: 3-14 (2002)), peroxisome proliferator-activated receptor-γ (PPAR-γ) (Gelman, L. et al. Cell Mol. Life Sci. 55: 932-943 (1999)), IGF-I (Giovannucci (2001)), thymine DNA glycosylase (TDG) (Hardeland, U. et al. Prog. Nucleic Acid Res. Mol. Biol. 68: 235-253 (2001)) and EGF (Mendelsohn, J. Endocrine-Related Cancer 8: 3-9 (2001)).

[0018] Gene deletion and mutation are not the only causes for development of colorectal cancers. Epigenetic silencing by DNA methylation also accounts for the loss of function of colorectal cancer suppressor genes. A strong association between MSI and CpG island methylation has been well characterized in sporadic colorectal cancers with high MSI but not in those of hereditary origin. In one experiment, DNA methylation of MLH1, CDKN2A, MGMT, THBS1, RARB, APC, and p14ARF genes has been shown in 80%, 55%, 23%, 23%, 58%, 35%, and 50% of 40 sporadic colorectal cancers with high MSI respectively. Yamamoto, H. et al. Genes Chromosomes Cancer 33: 322-325 (2002); and Kim, K. M. et al. Oncogene. 12; 21(35): 5441-9 (2002). Carcinogen metabolism enzymes such as GST, NAT, CYP and MTHFR are also associated with an increased or decreased colorectal cancer risk. Pistorius, S. et al. Kongressbd Dtsch Ges Chir Kongr 118: 820-824 (2001); and Potter, J. D. J. Natl. Cancer Inst. 91: 916-932 (1999).

[0019] From the foregoing, it is clear that procedures used for detecting, diagnosing, monitoring, staging, prognosticating, and preventing the recurrence of colorectal cancer are of critical importance to the outcome of the patient. Moreover, current procedures, while helpful in each of these analyses, are limited by their specificity, sensitivity, invasiveness, and/or their cost. As such, highly specific and sensitive procedures that would operate by way of detecting novel markers in cells, tissues, or bodily fluids, with minimal invasiveness and at a reasonable cost, would be highly desirable.

[0020] Accordingly, there is a great need for more sensitive and accurate methods for predicting whether a person is likely to develop colorectal cancer, for diagnosing colorectal cancer, for monitoring the progression of the disease, for staging the colorectal cancer, for determining whether the colorectal cancer has metastasized, and for imaging the colorectal cancer. Following accurate diagnosis, there is also a need for less invasive and more effective treatment of colorectal cancer.

[0021] Growth and metastasis of solid tumors are also dependent on angiogenesis. Folkman, J., 1986, Cancer Research, 46, 467-473; Folkman, J., 1989, Journal of the National Cancer Institute, 82, 4-6. It has been shown, for example, that tumors which enlarge to greater than 2 mm must obtain their own blood supply and do so by inducing the growth of new capillary blood vessels. Once these new blood vessels become embedded in the tumor, they provide a means for tumor cells to enter the circulation and metastasize to distant sites such as liver, lung or bone. Weidner, N., et al., 1991, New England Journal of Medicine, 324(1), 1-8.

[0022] Angiogenesis, defined as the growth or sprouting of new blood vessels from existing vessels, is a complex process that primarily occurs during embryonic development The process is distinct from vasculogenesis, in that the new endothelial cells lining the vessel arise from proliferation of existing cells, rather than differentiating from stem cells. The process is invasive and dependent upon proteolyisis of the extracellular matrix (ECM), migration of new endothelial cells, and synthesis of new matrix components. Angiogenesis occurs during embryogenic development of the circulatory system; however, in adult humans, angiogenesis only occurs as a response to a pathological condition (except during the reproductive cycle in women).

[0023] Under normal physiological conditions in adults, angiogenesis takes place only in very restricted situations such as hair growth and wounding healing. Auerbach, W. and Auerbach, R., 1994, Pharmacol Ther. 63(3):265-3 11; Ribatti et al.,1991, Haematologica 76(4):3 11-20; Risau, 1997, Nature 386(6626):67 1-4. Angiogenesis progresses by a stimulus which results in the formation of a migrating column of endothelial cells. Proteolytic activity is focused at the advancing tip of this “vascular sprout”, which breaks down the ECM sufficiently to permit the column of cells to infiltrate and migrate. Behind the advancing front, the endothelial cells differentiate and begin to adhere to each other, thus forming a new basement membrane. The cells then cease proliferation and finally define a lumen for the new arteriole or capillary.

[0024] Unregulated angiogenesis has gradually been recognized to be responsible for a wide range of disorders, including, but not limited to, cancer, cardiovascular disease, rheumatoid arthritis, psoriasis and diabetic retinopathy. Folkman, 1995, Nat Med 1(1):27-31; Isner, 1999, Circulation 99(13): 1653-5; Koch, 1998, Arthritis Rheum 41(6):951-62; Walsh, 1999, Rheumatology (Oxford) 38(2):103-12; Ware and Simons, 1997, Nat Med 3(2): 158-64.

[0025] Of particular interest is the observation that angiogenesis is required by solid tumors for their growth and metastases. Folkman, 1986 supra; Folkman 1990, J Natl. Cancer Inst., 82(1) 4-6; Folkman, 1992, Semin Cancer Biol 3(2):65-71; Zetter, 1998, Annu Rev Med 49:407-24. A tumor usually begins as a single aberrant cell which can proliferate only to a size of a few cubic millimeters due to the distance from available capillary beds, and it can stay ‘dormant’ without further growth and dissemination for a long period of time. Some tumor cells then switch to the angiogenic phenotype to activate endothelial cells, which proliferate and mature into new capillary blood vessels. These newly formed blood vessels not only allow for continued growth of the primary tumor, but also for the dissemination and recolonization of metastatic tumor cells. The precise mechanisms that control the angiogenic switch is not well understood, but it is believed that neovascularization of tumor mass results from the net balance of a multitude of angiogenesis stimulators and inhibitors Folkman, 1995, supra.

[0026] One of the most potent angiogenesis inhibitors is endostatin identified by O'Reilly and Folkman. O'Reilly et al., 1997, Cell 88(2):277-85; O'Reilly et al., 1994, Cell 79(2):3 15-28. Its discovery was based on the phenomenon that certain primary tumors can inhibit the growth of distant metastases. O'Reilly and Folkman hypothesized that a primary tumor initiates angiogenesis by generating angiogenic stimulators in excess of inhibitors. However, angiogenic inhibitors, by virtue of their longer half life in the circulation, reach the site of a secondary tumor in excess of the stimulators. The net result is the growth of primary tumor and inhibition of secondary tumor. Endostatin is one of a growing list of such angiogenesis inhibitors produced by primary tumors. It is a proteolytic fragment of a larger protein: endostatin is a 20 kDa fragment of collagen XVIII (amino acid H1132-K1315 in murine collagen XVIII). Endostatin has been shown to specifically inhibit endothelial cell proliferation in vitro and block angiogenesis in vivo. More importantly, administration of endostatin to tumor-bearing mice leads to significant tumor regression, and no toxicity or drug resistance has been observed even after multiple treatment cycles. Boehm et al., 1997, Nature 390(6658):404-407. The fact that endostatin targets genetically stable endothelial cells and inhibits a variety of solid tumors makes it a very attractive candidate for anticancer therapy. Fidler and Ellis, 1994, Cell 79(2):185-8; Gastl et al., 1997, Oncology 54(3):177-84; Hinsbergh et al., 1999, Ann Oncol 10 Suppl 4:60-3. In addition, angiogenesis inhibitors have been shown to be more effective when combined with radiation and chemotherapeutic agents. Klement, 2000, J. Clin Invest, 105(8) R15-24. Browder, 2000, Cancer Res. 6-(7) 1878-86, Arap et al., 1998, Science 279(5349):377-80; Mauceri et al., 1998, Nature 394(6690):287-91.

### SUMMARY OF THE INVENTION

[0027] The present invention solves many needs in the art by providing nucleic acid molecules, polypeptides and antibodies thereto, variants and derivatives of the nucleic acids and polypeptides, and agonists and antagonists thereto that may be used to identify, diagnose, monitor, stage, image and treat colon cancer and/or non-cancerous disease states in colon; identify and monitor colon tissue; and identify and design agonists and antagonists of polypeptides of the invention. The invention also provides gene therapy, methods for producing transgenic animals and cells, and methods for producing engineered colon tissue for treatment and research.

[0028] One aspect of the present invention relates to nucleic acid molecules that are specific to colon cells, colon tissue and/or the colon organ. These colon specific nucleic acids (CSNAs) may be a naturally occurring cDNA, genomic DNA, RNA, or a fragment of one of these nucleic acids, or may be a non-naturally occurring nucleic acid molecule. If the CSNA is genomic DNA, then the CSNA is a colon specific gene (CSG). If the CSNA is RNA, then it is a colon specific transcript encoded by a CSG. Due to alternative splicing and transcriptional modification one CSG may encode for multiple colon specific RNAs. In a preferred embodiment, the nucleic acid molecule encodes a polypeptide that is specific to colon. More preferred is a nucleic acid molecule that encodes a polypeptide comprising an amino acid sequence of SEQ ID NO: 95-248. In another preferred embodiment, the nucleic acid molecule comprises a nucleic acid sequence of SEQ ID NO: 1-94. For the CSNA sequences listed herein, DEX0450_{—}001.nt.1 corresponds to SEQ ID NO: 1. For sequences with multiple splice variants, the parent sequence DEX0450_{—}001.nt.1, will be followed by DEX0450_{—}001.nt.2, etc. for each splice variant. The sequences off the corresponding peptides are listed as DEX0450_{—}001.aa.1, etc. For the mapping of all of the nucleotides and peptides, see the table in the Example 1 section below.

[0029] This aspect of the present invention also relates to nucleic acid molecules that selectively hybridize or exhibit substantial sequence similarity to nucleic acid molecules encoding a Colon Specific Protein (CSP), or that selectively hybridize or exhibit substantial sequence similarity to a CSNA. In one embodiment of the present invention the nucleic acid molecule comprises an allelic variant of a nucleic acid molecule encoding a CSP, or an allelic variant of a CSNA. In another embodiment, the nucleic acid molecule comprises a part of a nucleic acid sequence that encodes a CSP or a part of a nucleic acid sequence of a CSNA.

[0030] In addition, this aspect of the present invention relates to a nucleic acid molecule further comprising one or more expression control sequences controlling the transcription and/or translation of all or a part of a CSNA or the transcription and/or translation of a nucleic acid molecule that encodes all or a fragment of a CSP.

[0031] Another aspect of the present invention relates to vectors and/or host cells comprising a nucleic acid molecule of this invention. In a preferred embodiment, the nucleic acid molecule of the vector and/or host cell encodes all or a fragment of a CSP. In another preferred embodiment, the nucleic acid molecule of the vector and/or host cell comprises all or a part of a CSNA. Vectors and host cells of the present invention are useful in the recombinant production of polypeptides, particularly CSPs of the present invention.

[0032] Another aspect of the present invention relates to polypeptides encoded by a nucleic acid molecule of this invention. The polypeptide may comprise either a fragment or a full-length protein. In a preferred embodiment, the polypeptide is a CSP. However, this aspect of the present invention also relates to mutant proteins (muteins) of CSPs, fusion proteins of which a portion is a CSP, and proteins and polypeptides encoded by allelic variants of a CSNA as provided herein.

[0033] A further aspect of the present invention is a novel splice variant which encodes an amino acid sequence that provides a novel region to be targeted for the generation of reagents that can be used in the detection and/or treatment of cancer. The novel amino acid sequence may lead to a unique protein structure, protein subcellular localization, biochemical processing or function. This information can be used to directly or indirectly facilitate the generation of additional or novel therapeutics or diagnostics. The nucleotide sequence in this novel splice variant can be used as a nucleic acid probe for the diagnosis and/or treatment of cancer.

[0034] Another aspect of the present invention relates to antibodies and other binders that specifically bind to a polypeptide of the instant invention. Accordingly antibodies or binders of the present invention specifically bind to CSPs, muteins, fusion proteins, and/or homologous proteins or polypeptides encoded by allelic variants of a CSNA as provided herein.

[0035] Another aspect of the present invention relates to agonists and antagonists of the nucleic acid molecules and polypeptides of this invention. The agonists and antagonists of the instant invention may be used to treat colon cancer and non-cancerous disease states in colon and to produce engineered colon tissue.

[0036] Another aspect of the present invention relates to methods for using the nucleic acid molecules to detect or amplify nucleic acid molecules that have similar or identical nucleic acid sequences compared to the nucleic acid molecules described herein. Such methods are useful in identifying, diagnosing, monitoring, staging, imaging and treating colon cancer and/or non-cancerous disease states in colon. Such methods are also useful in identifying and/or monitoring colon tissue. In addition, measurement of levels of one or more of the nucleic acid molecules of this invention may be useful as a diagnostic as part of a panel in combination with known other markers, particularly those described in the colon cancer background section above.

[0037] Another aspect of the present invention relates to use of the nucleic acid molecules of this invention in gene therapy, for producing transgenic animals and cells, and for producing engineered colon tissue for treatment and research.

[0038] Another aspect of the present invention relates to methods for detecting polypeptides of this invention, preferably using antibodies thereto. Such methods are useful to identify, diagnose, monitor, stage, image and treat colon cancer and non-cancerous disease states in colon. In addition, measurement of levels of one or more of the polypeptides of this invention may be useful to identify, diagnose, monitor, stage, and/or image colon cancer in combination with known other markers, particularly those described in the colon cancer background section above. The polypeptides of the present invention can also be used to identify and/or monitor colon tissue, and to produce engineered colon tissue.

[0039] Yet another aspect of the present invention relates to a computer readable means of storing the nucleic acid and amino acid sequences of the invention. The records of the computer readable means can be accessed for reading and displaying of sequences for comparison, alignment and ordering of the sequences of the invention to other sequences. In addition, the computer records regarding the nucleic acid and/or amino acid sequences and/or measurements of their levels may be used alone or in combination with other markers to diagnose colon related diseases.

### DETAILED DESCRIPTION OF THE INVETION

Definitions and General Techniques

[0040] Unless otherwise defined herein, scientific and technical terms used in connection with the present invention shall have the meanings that are commonly understood by those of ordinary skill in the art. Further, unless otherwise required by context, singular terms shall include pluralities and plural terms shall include the singular. Generally, nomenclatures used in connection with, and techniques of, cell and tissue culture, molecular biology, immunology, microbiology, genetics and protein and nucleic acid chemistry and hybridization described herein are those well known and commonly used in the art. The methods and techniques of the present invention are generally performed according to conventional methods well known in the art and as described in various general and more specific references that are cited and discussed throughout the present specification unless otherwise indicated. See, e.g., Sambrook et al., Molecular Cloning: A Laboratory Manual, 2d ed., Cold Spring Harbor Laboratory Press (1989) and Sambrook et al., Molecular Cloning: A Laboratory Manual, 3d ed., Cold Spring Harbor Press (2001); Ausubel et al., Current Protocols in Molecular Biology, Greene Publishing Associates (1992, and Supplements to 2000); Ausubel et al., Short Protocols in Molecular Biology: A Compendium of Methods from Current Protocols in Molecular Biology—4^{th} Ed., Wiley & Sons (1999); Harlow and Lane, Antibodies: A Laboratory Manual, Cold Spring Harbor Laboratory Press (1990); and Harlow and Lane, Using Antibodies: A Laboratory Manual, Cold Spring Harbor Laboratory Press (1999).

[0041] Enzymatic reactions and purification techniques are performed according to manufacturer's specifications, as commonly accomplished in the art or as described herein. The nomenclatures used in connection with, and the laboratory procedures and techniques of, analytical chemistry, synthetic organic chemistry, and medicinal and pharmaceutical chemistry described herein are those well known and commonly used in the art. Standard techniques are used for chemical syntheses, chemical analyses, pharmaceutical preparation, formulation, and delivery, and treatment of patients.

[0042] The following terms, unless otherwise indicated, shall be understood to have the following meanings:

[0043] A “nucleic acid molecule” of this invention refers to a polymeric form of nucleotides and includes both sense and antisense strands of RNA, cDNA, genomic DNA, and synthetic forms and mixed polymers of the above. A nucleotide refers to a ribonucleotide, deoxynucleotide or a modified form of either type of nucleotide. A “nucleic acid molecule” as used herein is synonymous with “nucleic acid” and “polynucleotide.” The term “nucleic acid molecule” usually refers to a molecule of at least 10 bases in length, unless otherwise specified. The term includes single- and double-stranded forms of DNA. In addition, a polynucleotide may include either or both naturally occurring and modified nucleotides linked together by naturally occurring and/or non-naturally occurring nucleotide linkages.

[0044] Nucleotides are represented by single letter symbols in nucleic acid molecule sequences. The following table lists symbols identifying nucleotides or groups of nucleotides which may occupy the symbol position on a nucleic acid molecule. See Nomenclature Committee of the International Union of Biochemistry NC-IUB), Nomenclature for incompletely specified bases in nucleic acid sequences, Recommendations 1984., Eur J Biochem. 150(1):1-5 (1985).

| | | | Complementary |
|---|---|---|---|
| Symbol | Meaning | Group/Origin of Designation | Symbol |
| a | a | Adenine | t/u |
| g | g | Guanine | c |
| c | c | Cytosine | g |
| t | t | Thymine | a |
| u | u | Uracil | a |
| r | g or a | puRine | y |
| y | t/u or c | pYrimidine | r |
| m | a or c | aMino | k |
| k | g or t/u | Keto | m |
| s | g or c | Strong interactions 3H-bonds | w |
| w | a or t/u | Weak interactions 2H-bonds | s |
| b | g or c or t/u | not a | v |
| d | a or g or t/u | not c | h |
| h | a or c or t/u | not g | d |
| v | a or g or c | not t, not u | b |
| n | a or g or c | aNy | n |
| | or t/u, | | |
| | unknown, or | | |
| | other | | |

[0045] The nucleic acid molecules may be modified chemically or biochemically or may contain non-natural or derivatized nucleotide bases, as will be readily appreciated by those of skill in the art Such modifications include, for example, labels, methylation, substitution of one or more of the naturally occurring nucleotides with an analog, internucleotide modifications such as uncharged linkages (e.g., methyl phosphonates, phosphotriesters, phosphoramidates, carbamates, etc.), charged linkages (e.g., phosphorothioates, phosphorodithioates, etc.), pendent moieties (e.g., polypeptides), intercalators (e.g., acridine, psoralen, etc.), chelators, alkylators, and modified linkages (e.g., alpha anomeric nucleic acids, etc.) The term “nucleic acid molecule” also includes any topological conformation, including single-stranded, double-stranded, partially duplexed, triplexed, hairpinned, circular and padlocked conformations. Also included are synthetic molecules that mimic polynucleotides in their ability to bind to a designated sequence via hydrogen bonding and other chemical interactions. Such molecules are known in the art and include, for example, those in which peptide linkages substitute for phosphate linkages in the backbone of the molecule.

[0046] A “gene” is defined as a nucleic acid molecule that comprises a nucleic acid sequence that encodes a polypeptide and the expression control sequences that surround the nucleic acid sequence that encodes the polypeptide. For instance, a gene may comprise a promoter, one or more enhancers, a nucleic acid sequence that encodes a polypeptide, downstream regulatory sequences and, possibly, other nucleic acid sequences involved in regulation of the expression of an RNA. As is well known in the art, eukaryotic genes usually contain both exons and introns. The term “exon” refers to a nucleic acid sequence found in genomic DNA that is bioinformatically predicted and/or experimentally confirmed to contribute contiguous sequence to a mature mRNA transcript. The term “intron” refers to a nucleic acid sequence found in genomic DNA that is predicted and/or confirmed to not contribute to a mature mRNA transcript, but rather to be “spliced out” during processing of the transcript.

[0047] A nucleic acid molecule or polypeptide is “derived” from a particular species if the nucleic acid molecule or polypeptide has been isolated from the particular species, or if the nucleic acid molecule or polypeptide is homologous to a nucleic acid molecule or polypeptide isolated from a particular species.

[0048] An “isolated” or “substantially pure” nucleic acid or polynucleotide (e.g., an RNA, DNA or a mixed polymer) is one which is substantially separated from other cellular components that naturally accompany the native polynucleotide in its natural host cell, e.g., ribosomes, polymerases, or genomic sequences with which it is naturally associated. The term embraces a nucleic acid or polynucleotide that (1) has been removed from its naturally occurring environment, (2) is not associated with all or a portion of a polynucleotide in which the “isolated polynucleotide” is found in nature, (3) is operatively linked to a polynucleotide which it is not linked to in nature, (4) does not occur in nature as part of a larger sequence or (5) includes nucleotides or internucleoside bonds that are not found in nature. The term “isolated” or “substantially pure” also can be used in reference to recombinant or cloned DNA isolates, chemically synthesized polynucleotide analogs, or polynucleotide analogs that are biologically synthesized by heterologous systems. The term “isolated nucleic acid molecule” includes nucleic acid molecules that are integrated into a host cell chromosome at a heterologous site, recombinant fusions of a native fragment to a heterologous sequence, recombinant vectors present as episomes or as integrated into a host cell chromosome.

[0049] A “part” of a nucleic acid molecule refers to a nucleic acid molecule that comprises a partial contiguous sequence of at least 10 bases of the reference nucleic acid molecule. Preferably, a part comprises at least 15 to 20 bases of a reference nucleic acid molecule. In theory, a nucleic acid sequence of 17 nucleotides is of sufficient length to occur at random less frequently than once in the three gigabase human genome, and thus provides a nucleic acid probe that can uniquely identify the reference sequence in a nucleic acid mixture of genomic complexity. A preferred part is one that comprises a nucleic acid sequence that can encode at least 6 contiguous amino acid sequences (fragments of at least 18 nucleotides) because they are useful in directing the expression or synthesis of peptides that are useful in mapping the epitopes of the polypeptide encoded by the reference nucleic acid. See, e.g., Geysen et al., Proc. Natl. Acad. Sci. USA 81:3998-4002 (1984); and U.S. Pat. Nos. 4,708,871 and 5,595,915, the disclosures of which are incorporated herein by reference in their entireties. A part may also comprise at least 25, 30, 35 or 40 nucleotides of a reference nucleic acid molecule, or at least 50, 60, 70, 80, 90, 100, 150, 200, 250, 300, 350, 400 or 500 nucleotides of a reference nucleic acid molecule. A part of a nucleic acid molecule may comprise no other nucleic acid sequences. Alternatively, a part of a nucleic acid may comprise other nucleic acid sequences from other nucleic acid molecules.

[0050] The term “oligonucleotide” refers to a nucleic acid molecule generally comprising a length of 200 bases or fewer. The term often refers to single-stranded deoxyribonucleotides, but it can refer as well to single-or double-stranded ribonucleotides, RNA:DNA hybrids and double-stranded DNAs, among others. Preferably, oligonucleotides are 10 to 60 bases in length and most preferably 12, 13, 14, 15, 16, 17, 18, 19 or 20 bases in length. Other preferred oligonucleotides are 25, 30, 35, 40, 45, 50, 55 or 60 bases in length. Oligonucleotides may be single-stranded, e.g. for use as probes or primers, or may be double-stranded, e.g. for use in the construction of a mutant gene. Oligonucleotides of the invention can be either sense or antisense oligonucleotides. An oligonucleotide can be derivatized or modified as discussed above for nucleic acid molecules.

[0051] Oligonucleotides, such as single-stranded DNA probe oligonucleotides, often are synthesized by chemical methods, such as those implemented on automated oligonucleotide synthesizers. However, oligonucleotides can be made by a variety of other methods, including in vitro recombinant DNA-mediated techniques and by expression of DNAs in cells and organisms. Initially, chemically synthesized DNAs typically are obtained without a 5′ phosphate. The 5′ ends of such oligonucleotides are not substrates for phosphodiester bond formation by ligation reactions that employ DNA ligases typically used to form recombinant DNA molecules. Where ligation of such oligonucleotides is desired, a phosphate can be added by standard techniques, such as those that employ a kinase and ATP. The 3′ end of a chemically synthesized oligonucleotide generally has a free hydroxyl group and, in the presence of a ligase, such as T4 DNA ligase, readily will form a phosphodiester bond with a 5′ phosphate of another polynucleotide, such as another oligonucleotide. As is well known, this reaction can be prevented selectively, where desired, by removing the 5′ phosphates of the other polynucleotide(s) prior to ligation.

[0052] The term “naturally occurring nucleotide” referred to herein includes naturally occurring deoxyribonucleotides and ribonucleotides. The term “modified nucleotides” referred to herein includes nucleotides with modified or substituted sugar groups and the like. The term “nucleotide linkages” referred to herein includes nucleotide linkages such as phosphorothioate, phosphorodithioate, phosphoroselenoate, phosphorodiselenoate, phosphoroanilothioate, phoshoraniladate, phosphoroamidate, and the like. See e.g., LaPlanche et al. Nucl. Acids Res. 14:9081-9093 (1986); Stein et al. Nucl. Acids Res. 16:3209-3221 (1988); Zon et al. Anti-Cancer Drug Design 6:539-568 (1991); Zon et., in Eckstein (ed.) Oligonucleotides and Analogues: A Practical Approach. pp. 87-108, Oxford University Press (1991); Uhlmann and Peyman Chemical Reviews 90:543 (1990), and U.S. Pat. No. 5,151,510, the disclosure of which is hereby incorporated by reference in its entirety.

[0053] Unless specified otherwise, the left hand end of a polynucleotide sequence in sense orientation is the 5′ end and the right hand end of the sequence is the 3′ end. In addition, the left hand direction of a polynucleotide sequence in sense orientation is referred to as the 5′ direction, while the right hand direction of the polynucleotide sequence is referred to as the 3′ direction. Further, unless otherwise indicated, each nucleotide sequence is set forth herein as a sequence of deoxyribonucleotides. It is intended, however, that the given sequence be interpreted as would be appropriate to the polynucleotide composition: for example, if the isolated nucleic acid is composed of RNA, the given sequence intends ribonucleotides, with uridine substituted for thymidine.

[0054] The term “allelic variant” refers to one of two or more alternative naturally occurring forms of a gene, wherein each gene possesses a unique nucleotide sequence. In a preferred embodiment, different alleles of a given gene have similar or identical biological properties.

[0055] The term “percent sequence identity” in the context of nucleic acid sequences refers to the residues in two sequences which are the same when aligned for maximum correspondence. The length of sequence identity comparison may be over a stretch of at least about nine nucleotides, usually at least about 20 nucleotides, more usually at least about 24 nucleotides, typically at least about 28 nucleotides, more typically at least about 32 nucleotides, and preferably at least about 36 or more nucleotides. There are a number of different algorithms known in the art which can be used to measure nucleotide sequence identity. For instance, polynucleotide sequences can be compared using FASTA, Gap or Bestfit, which are programs in Wisconsin Package Version 10.0, Genetics Computer Group (GCG), Madison, Wis. FASTA, which includes, e.g., the programs FASTA2 and FASTA3, provides alignments and percent sequence identity of the regions of the best overlap between the query and search sequences (Pearson, Methods Enzymol. 183: 63-98 (1990); Pearson, Methods Mol. Biol. 132: 185-219 (2000); Pearson, Methods Enzymol. 266: 227-258 (1996); Pearson, J. Mol. Biol. 276: 71-84 (1998)). Unless otherwise specified, default parameters for a particular program or algorithm are used. For instance, percent sequence identity between nucleic acid sequences can be determined using FASTA with its default parameters (a word size of 6 and the NOPAM factor for the scoring matrix) or using Gap with its default parameters as provided in GCG Version 6.1.

[0056] A reference to a nucleic acid sequence encompasses its complement unless otherwise specified. Thus, a reference to a nucleic acid molecule having a particular sequence should be understood to encompass its complementary strand, with its complementary sequence. The complementary strand is also useful, e.g., for antisense therapy, double-stranded RNA (dsRNA) inhibition (RNAi), combination of triplex and antisense, hybridization probes and PCR primers.

[0057] In the molecular biology art, researchers use the terms “percent sequence identity”, “percent sequence similarity” and “percent sequence homology” interchangeably. In this application, these terms shall have the same meaning with respect to nucleic acid sequences only.

[0058] The term “substantial similarity” or “substantial sequence similarity,” when referring to a nucleic acid or fragment thereof, indicates that, when optimally aligned with appropriate nucleotide insertions or deletions with another nucleic acid (or its complementary strand), there is nucleotide sequence identity in at least about 50%, more preferably 60% of the nucleotide bases, usually at least about 70%, more usually at least about 80%, preferably at least about 90%, and more preferably at least about 95-98% of the nucleotide bases, as measured by any well known algorithm of sequence identity, such as FASTA, BLAST or Gap, as discussed above.

[0059] Alternatively, substantial similarity exists between a first and second nucleic acid sequence when the first nucleic acid sequence or fragment thereof hybridizes to an antisense strand of the second nucleic acid, under selective hybridization conditions. Typically, selective hybridization will occur between the first nucleic acid sequence and an antisense strand of the second nucleic acid sequence when there is at least about 55% sequence identity between the first and second nucleic acid sequences—preferably at least about 65%, more preferably at least about 75%, and most preferably at least about 90%—over a stretch of at least about 14 nucleotides, more preferably at least 17 nucleotides, even more preferably at least 20, 25, 30, 35, 40, 50, 60, 70, 80, 90 or 100 nucleotides.

[0060] Nucleic acid hybridization will be affected by such conditions as salt concentration, temperature, solvents, the base composition of the hybridizing species, length of the complementary regions, and the number of nucleotide base mismatches between the hybridizing nucleic acids, as will be readily appreciated by those skilled in the art. “Stringent hybridization conditions” and “stringent wash conditions” in the context of nucleic acid hybridization experiments depend upon a number of different physical parameters. The most important parameters include temperature of hybridization, base composition of the nucleic acids, salt concentration and length of the nucleic acid. One having ordinary skill in the art knows how to vary these parameters to achieve a particular stringency of hybridization. In general, “stringent hybridization” is performed at about 25° C. below the thermal melting point (Tₘ) for the specific DNA hybrid under a particular set of conditions. “Stringent washing” is performed at temperatures about 5° C. lower than the Tₘ for the specific DNA hybrid under a particular set of conditions. The Tₘ is the temperature at which 50% of the target sequence hybridizes to a perfectly matched probe. See Sambrook (1989), supra, p. 9.51.

[0061] The Tₘ for a particular DNA-DNA hybrid can be estimated by the formula:
Tₘ=81.5° C.+16.6(log₁₀[Na⁺])+0.41(fraction G+C)−0.63(% formamide)−(600/l) where l is the length of the hybrid in base pairs.

[0062] The Tₘ for a particular RNA-RNA hybrid can be estimated by the formula:
Tₘ=79.8° C.+18.5(log₁₀[Na⁺])+0.58 (fraction G+C)+11.8(fraction G+C)²−0.35 (% formamide)−(820/l).

[0063] The Tₘ for a particular RNA-DNA hybrid can be estimated by the formula:
Tₘ=79.8° C.+18.5(log₁₀[Na⁺])+0.58 (fraction G+C)+11.8(fraction G+C)²−0.50(% formamide)−(820/l).

[0064] In general, the Tₘ decreases by 1-1.5° C. for each 1% of mismatch between two nucleic acid sequences. Thus, one having ordinary skill in the art can alter hybridization and/or washing conditions to obtain sequences that have higher or lower degrees of sequence identity to the target nucleic acid. For instance, to obtain hybridizing nucleic acids that contain up to 10% mismatch from the target nucleic acid sequence, 10-15° C. would be subtracted from the calculated Tₘ of a perfectly matched hybrid, and then the hybridization and washing temperatures adjusted accordingly. Probe sequences may also hybridize specifically to duplex DNA under certain conditions to form triplex or other higher order DNA complexes. The preparation of such probes and suitable hybridization conditions are well known in the art.

[0065] An example of stringent hybridization conditions for hybridization of complementary nucleic acid sequences having more than 100 complementary residues on a filter in a Southern or Northern blot or for screening a library is 50% formamide/6×SSC at 42° C. for at least ten hours and preferably overnight (approximately 16 hours). Another example of stringent hybridization conditions is 6×SSC at 68° C. without formamide for at least ten hours and preferably overnight. An example of moderate stringency hybridization conditions is 6×SSC at 55° C. without formamide for at least ten hours and preferably overnight. An example of low stringency hybridization conditions for hybridization of complementary nucleic acid sequences having more than 100 complementary residues on a filter in a Southern or northern blot or for screening a library is 6×SSC at 42° C. for at least ten hours. Hybridization conditions to identify nucleic acid sequences that are similar but not identical can be identified by experimentally changing the hybridization temperature from 68° C. to 42° C. while keeping the salt concentration constant (6×SSC), or keeping the hybridization temperature and salt concentration constant (e.g. 42° C. and 6×SSC) and varying the formamide concentration from 50% to 0%. Hybridization buffers may also include blocking agents to lower background. These agents are well known in the art. See Sambrook et al. (1989), supra, pages 8.46 and 9.46-9.58. See also Ausubel (1992), supra, Ausubel (1999), supra, and Sambrook (2001), supra.

[0066] Wash conditions also can be altered to change stringency conditions. An example of stringent wash conditions is a 0.2× SSC wash at 65° C. for 15 minutes (see Sambrook (1989), supra, for SSC buffer). Often the high stringency wash is preceded by a low stringency wash to remove excess probe. An exemplary medium stringency wash for duplex DNA of more than 100 base pairs is 1×SSC at 45° C. for 15 minutes. An exemplary low stringency wash for such a duplex is 4×SSC at 40° C. for 15 minutes. In general, signal-to-noise ratio of 2× or higher than that observed for an unrelated probe in the particular hybridization assay indicates detection of a specific hybridization.

[0067] As defined herein, nucleic acids that do not hybridize to each other under stringent conditions are still substantially similar to one another if they encode polypeptides that are substantially identical to each other. This occurs, for example, when a nucleic acid is created synthetically or recombinantly using a high codon degeneracy as permitted by the redundancy of the genetic code.

[0068] Hybridization conditions for nucleic acid molecules that are shorter than 100 nucleotides in length (e.g., for oligonucleotide probes) may be calculated by the formula:

[0069] Tₘ=81.5° C.+16.6(log₁₀[Na⁺])+0.41(fraction G+C)−(600/N), wherein N is change length and the [Na⁺] is 1 M or less. See Sambrook (1989), supra, p. 11.46. For hybridization of probes shorter than 100 nucleotides, hybridization is usually performed under stringent conditions (5-10° C. below the Tₘ) using high concentrations (0.1-1.0 pmol/ml) of probe. Id. at p. 11.45. Determination of hybridization using mismatched probes, pools of degenerate probes or “guessmers,” as well as hybridization solutions and methods for empirically determining hybridization conditions are well known in the art. See, e.g., Ausubel (1999), supra; Sambrook (1989), supra, pp. 11.45-11.57.

[0070] The term “digestion” or “digestion of DNA” refers to catalytic cleavage of the DNA with a restriction enzyme that acts only at certain sequences in the DNA. The various restriction enzymes referred to herein are commercially available and their reaction conditions, cofactors and other requirements for use are known and routine to the skilled artisan. For analytical purposes, typically, 1 μg of plasmid or DNA fragment is digested with about 2 units of enzyme in about 20 μl of reaction buffer. For the purpose of isolating DNA fragments for plasmid construction, typically 5 to 50 μg of DNA are digested with 20 to 250 units of enzyme in proportionately larger volumes. Appropriate buffers and substrate amounts for particular restriction enzymes are described in standard laboratory manuals, such as those referenced below, and are specified by commercial suppliers. Incubation times of about 1 hour at 37° C. are ordinarily used, but conditions may vary in accordance with standard procedures, the supplier's instructions and the particulars of the reaction. After digestion, reactions may be analyzed, and fragments may be purified by electrophoresis through an agarose or polyacrylamide gel, using well known methods that are routine for those skilled in the art.

[0071] The term “ligation” refers to the process of forming phosphodiester bonds between two or more polynucleotides, which most often are double-stranded DNAs. Techniques for ligation are well known to the art and protocols for ligation are described in standard laboratory manuals and references, such as, e.g., Sambrook (1989), supra.

[0072] Genome-derived “single exon probes,” are probes that comprise at least part of an exon (“reference exon”) and can hybridize detectably under high stringency conditions to transcript-derived nucleic acids that include the reference exon but do not hybridize detectably under high stringency conditions to nucleic acids that lack the reference exon. Single exon probes typically further comprise, contiguous to a first end of the exon portion, a first intronic and/or intergenic sequence that is identically contiguous to the exon in the genome, and may contain a second intronic and/or intergenic sequence that is identically contiguous to the exon in the genome. The minimum length of genome-derived single exon probes is defined by the requirement that the exonic portion be of sufficient length to hybridize under high stringency conditions to transcript-derived nucleic acids, as discussed above. The maximum length of genome-derived single exon probes is defined by the requirement that the probes contain portions of no more than one exon. The single exon probes may contain priming sequences not found in contiguity with the rest of the probe sequence in the genome, which priming sequences are useful for PCR and other amplification-based technologies. In another aspect, the invention is directed to single exon probes based on the CSNAs disclosed herein.

[0073] In one embodiment, the term “microarray” refers to a “nucleic acid microarray” having a substrate-bound plurality of nucleic acids, hybridization to each of the plurality of bound nucleic acids being separately detectable. The substrate can be solid or porous, planar or non-planar, unitary or distributed. Nucleic acid microarrays include all the devices so called in Schena (ed.), DNA Microarrays: A Practical Approach (Practical Approach Series), Oxford University Press (1999); Nature Genet. 21(1)(suppl.):1-60 (1999); Schena (ed.), Microarray Biochip: Tools and Technology, Eaton Publishing Company/BioTechniques Books Division (2000). Additionally, these nucleic acid microarrays include a substrate-bound plurality of nucleic acids in which the plurality of nucleic acids are disposed on a plurality of beads, rather than on a unitary planar substrate, as is described, inter alia, in Brenner et al., Proc. Natl. Acad. Sci. USA 97(4):1665-1670 (2000). Examples of nucleic acid microarrays may be found in U.S. Pat. Nos. 6,391,623, 6,383,754, 6,383,749, 6,380,377, 6,379,897, 6,376,191, 6,372,431, 6,351,712 6,344,316, 6,316,193, 6,312,906, 6,309,828, 6,309,824, 6,306,643, 6,300,063, 6,287,850, 6,284,497, 6,284,465, 6,280,954, 6,262,216, 6,251,601, 6,245,518, 6,263,287, 6,251,601, 6,238,866, 6,228,575, 6,214,587, 6,203,989, 6,171,797, 6,103,474, 6,083,726, 6,054,274, 6,040,138, 6,083,726, 6,004,755, 6,001,309, 5,958,342, 5,952,180, 5,936,731, 5,843,655, 5,814,454, 5,837,196, 5,436,327, 5,412,087, and 5,405,783, the disclosures of which are incorporated herein by reference in their entireties.

[0074] In an alternative embodiment, a “microarray” may also refer to a “peptide microarray” or “protein microarray” having a substrate-bound collection or plurality of polypeptides, the binding to each of the plurality of bound polypeptides being separately detectable. Alternatively, the peptide microarray may have a plurality of binders, including but not limited to monoclonal antibodies, polyclonal antibodies, phage display binders, yeast 2 hybrid binders, and aptamers, which can specifically detect the binding of the polypeptides of this invention. The array may be based on autoantibody detection to the polypeptides of this invention, see Robinson et al., Nature Medicine 8(3):295-301 (2002). Examples of peptide arrays may be found in WO 02/31463, WO 02/25288, WO 01/94946, WO 01/88162, WO 01/68671, WO 01/57259, WO 00/61806, WO 00/54046, WO 00/47774, WO 99/40434, WO 99/39210, and WO 97/42507 and U.S. Pat. Nos. 6,268,210, 5,766,960, and 5,143,854, the disclosures of which are incorporated herein by reference in their entireties.

[0075] In addition, determination of the levels of the CSNA or CSP may be made in a multiplex manner using techniques described in WO 02/29109, WO 02/24959, WO 01/83502, WO 01/73113, WO 01/59432, WO 01/57269, and WO 99/67641, the disclosures of which are incorporated herein by reference in their entireties.

[0076] The term “mutant”, “mutated”, or “mutation” when applied to nucleic acid sequences means that nucleotides in a nucleic acid sequence may be inserted, deleted or changed compared to a reference nucleic acid sequence. A single alteration may be made at a locus (a point mutation) or multiple nucleotides may be inserted, deleted or changed at a single locus. In addition, one or more alterations may be made at any number of loci within a nucleic acid sequence. In a preferred embodiment of the present invention, the nucleic acid sequence is the wild type nucleic acid sequence encoding a CSP or is a CSNA. The nucleic acid sequence may be mutated by any method known in the art including those mutagenesis techniques described infra.

[0077] The term “error-prone PCR” refers to a process for performing PCR under conditions where the copying fidelity of the DNA polymerase is low, such that a high rate of point mutations is obtained along the entire length of the PCR product. See, e.g., Leung et al., Technique 1: 11-15 (1989) and Caldwell et al., PCR Methods Applic. 2: 28-33 (1992).

[0078] The term “oligonucleotide-directed mutagenesis” refers to a process which enables the generation of site-specific mutations in any cloned DNA segment of interest. See, e.g., Reidhaar-Olson et al., Science 241: 53-57 (1988).

[0079] The term “assembly PCR” refers to a process which involves the assembly of a PCR product from a mixture of small DNA fragments. A large number of different PCR reactions occur in parallel in the same vial, with the products of one reaction priming the products of another reaction.

[0080] The term “sexual PCR mutagenesis” or “DNA shuffling” refers to a method of error-prone PCR coupled with forced homologous recombination between DNA molecules of different but highly related DNA sequence in vitro, caused by random fragmentation of the DNA molecule based on sequence similarity, followed by fixation of the crossover by primer extension in an error-prone PCR reaction. See, e.g. Stemmer, Proc. Natl. Acad. Sci. U.S.A. 91: 10747-10751 (1994). DNA shuffling can be carried out between several related genes (“Family shuffling”).

[0081] The term “in vivo mutagenesis” refers to a process of generating random mutations in any cloned DNA of interest which involves the propagation of the DNA in a strain of bacteria such as E. coli that carries mutations in one or more of the DNA repair pathways. These “mutator” strains have a higher random mutation rate than that of a wild-type parent. Propagating the DNA in a mutator strain will eventually generate random mutations within the DNA.

[0082] The term “cassette mutagenesis” refers to any process for replacing a small region of a double-stranded DNA molecule with a synthetic oligonucleotide “cassette” that differs from the native sequence. The oligonucleotide often contains completely and/or partially randomized native sequence.

[0083] The term “recursive ensemble mutagenesis” refers to an algorithm for protein engineering (protein mutagenesis) developed to produce diverse populations of phenotypically related mutants whose members differ in amino acid sequence. This method uses a feedback mechanism to control successive rounds of combinatorial cassette mutagenesis. See, e.g., Arkin et al., Proc. Natl. Acad. Sci. U.S.A. 89: 7811-7815 (1992).

[0084] The term “exponential ensemble mutagenesis” refers to a process for generating combinatorial libraries with a high percentage of unique and functional mutants, wherein small groups of residues are randomized in parallel to identify, at each altered position, amino acids which lead to functional proteins. See, e.g., Delegrave et al., Biotechnology Research 11: 1548-1552 (1993); Arnold, Current Opinion in Biotechnology 4: 450-455 (1993).

[0085] “Operatively linked” expression control sequences refers to a linkage in which the expression control sequence is either contiguous with the gene of interest to control the gene of interest, or acts in trans or at a distance to control the gene of interest.

[0086] The term “expression control sequence” as used herein refers to polynucleotide sequences which are necessary to affect the expression of coding sequences to which they are operatively linked. Expression control sequences are sequences which control the transcription, post-transcriptional events and translation of nucleic acid sequences. Expression control sequences include appropriate transcription initiation, termination, promoter and enhancer sequences; efficient RNA processing signals such as splicing and polyadenylation signals; sequences that stabilize cytoplasmic mRNA; sequences that enhance translation efficiency (e.g., ribosome binding sites); sequences that enhance protein stability; and when desired, sequences that enhance protein secretion. The nature of such control sequences differs depending upon the host organism; in prokaryotes, such control sequences generally include promoter, ribosomal binding site, and transcription termination sequence. The term “control sequences” is intended to include, at a minimum, all components whose presence is essential for expression, and can also include additional components whose presence is advantageous, for example, leader sequences and fusion partner sequences.

[0087] The term “vector,” as used herein, is intended to refer to a nucleic acid molecule capable of transporting another nucleic acid to which it has been linked. One type of vector is a “plasmid”, which refers to a circular double-stranded DNA loop into which additional DNA segments may be ligated. Other vectors include cosmids, bacterial artificial chromosomes (BAC) and yeast artificial chromosomes (YAC). Another type of vector is a viral vector, wherein additional DNA segments may be ligated into the viral genome. Viral vectors that infect bacterial cells are referred to as bacteriophages. Certain vectors are capable of autonomous replication in a host cell into which they are introduced (e.g., bacterial vectors having a bacterial origin of replication). Other vectors can be integrated into the genome of a host cell upon introduction into the host cell, and thereby are replicated along with the host genome. Moreover, certain vectors are capable of directing the expression of genes to which they are operatively linked. Such vectors are referred to herein as “recombinant expression vectors” (or simply, “expression vectors”). In general, expression vectors of utility in recombinant DNA techniques are often in the form of plasmids. In the present specification, “plasmid” and “vector” may be used interchangeably as the plasmid is the most commonly used form of vector. However, the invention is intended to include other forms of expression vectors that serve equivalent functions.

[0088] The term “recombinant host cell” (or simply “host cell”), as used herein, is intended to refer to a cell into which a recombinant expression vector has been introduced. It should be understood that such terms are intended to refer not only to the particular subject cell but to the progeny of such a cell. Because certain modifications may occur in succeeding generations due to either mutation or environmental influences, such progeny may not, in fact, be identical to the parent cell, but are still included within the scope of the term “host cell” as used herein.

[0089] As used herein, the phrase “open reading frame” and the equivalent acronym “ORF” refers to that portion of a transcript-derived nucleic acid that can be translated in its entirety into a sequence of contiguous amino acids. As so defined, an ORF has length, measured in nucleotides, exactly divisible by 3. As so defined, an ORF need not encode the entirety of a natural protein.

[0090] As used herein, the phrase “ORF-encoded peptide” refers to the predicted or actual translation of an ORF.

[0091] As used herein, the phrase “degenerate variant” of a reference nucleic acid sequence is meant to be inclusive of all nucleic acid sequences that can be directly translated, using the standard genetic code, to provide an amino acid sequence identical to that translated from the reference nucleic acid sequence.

[0092] The term “polypeptide” encompasses both naturally occurring and non-naturally occurring proteins and polypeptides, as well as polypeptide fragments and polypeptide mutants, derivatives and analogs thereof. A polypeptide may be monomeric or polymeric. Further, a polypeptide may comprise a number of different modules within a single polypeptide each of which has one or more distinct activities. A preferred polypeptide in accordance with the invention comprises a CSP encoded by a nucleic acid molecule of the instant invention, or a fragment, mutant, analog or derivative thereof.

[0093] The term “isolated protein” or “isolated polypeptide” is a protein or polypeptide that by virtue of its origin or source of derivation (1) is not associated with naturally associated components that accompany it in its native state, (2) is free of other proteins from the same species (3) is expressed by a cell from a different species, or (4) does not occur in nature. Thus, a polypeptide that is chemically synthesized or synthesized in a cellular system different from the cell from which it naturally originates will be “isolated” from its naturally associated components. A polypeptide or protein may also be rendered substantially free of naturally associated components by isolation, using protein purification techniques well known in the art.

[0094] A protein or polypeptide is “substantially pure,” “substantially homogeneous” or “substantially purified” when at least about 60% to 75% of a sample exhibits a single species of polypeptide. The polypeptide or protein may be monomeric or multimeric. A substantially pure polypeptide or protein will typically comprise about 50%, 60%, 70%, 80% or 90% W/W of a protein sample, more usually about 95%, and preferably will be over 99% pure. Protein purity or homogeneity may be determined by a number of means well known in the art, such as polyacrylamide gel electrophoresis of a protein sample, followed by visualizing a single polypeptide band upon staining the gel with a stain well known in the art. For certain purposes, higher resolution may be provided by using BPLC or other means well known in the art for purification.

[0095] The term “fragment” when used herein with respect to polypeptides of the present invention refers to a polypeptide that has an amino-terminal and/or carboxy-terminal deletion compared to a full-length CSP. In a preferred embodiment, the fragment is a contiguous sequence in which the amino acid sequence of the fragment is identical to the corresponding positions in the naturally occurring polypeptide. Fragments typically are at least 5, 6, 7, 8, 9 or 10 amino acids long, preferably at least 12, 14, 16 or 18 amino acids long, more preferably at least 20 amino acids long, more preferably at least 25, 30, 35, 40 or 45, amino acids, even more preferably at least 50 or 60 amino acids long, and even more preferably at least 70 amino acids long.

[0096] A “derivative” when used herein with respect to polypeptides of the present invention refers to a polypeptide which is substantially similar in primary structural sequence to a CSP but which includes, e.g., in vivo or in vitro chemical and biochemical modifications that are not found in the CSP. Such modifications include, for example, acetylation, acylation, ADP-ribosylation, amidation, covalent attachment of flavin, covalent attachment of a heme moiety, covalent attachment of a nucleotide or nucleotide derivative, covalent attachment of a lipid or lipid derivative, covalent attachment of phosphotidylinositol, cross-linking, cyclization, disulfide bond formation, demethylation, formation of covalent cross-links, formation of cystine, formation of pyroglutamate, formylation, gamma-carboxylation, glycosylation, GPI anchor formation, hydroxylation, iodination, methylation, myristoylation, oxidation, proteolytic processing, phosphorylation, prenylation, racemization, selenoylation, sulfation, transfer-RNA mediated addition of amino acids to proteins such as arginylation, and ubiquitination. Other modifications include, e.g., labeling with radionuclides, and various enzymatic modifications, as will be readily appreciated by those skilled in the art. A variety of methods for labeling polypeptides and of substituents or labels useful for such purposes are well known in the art, and include radioactive isotopes such as ¹²⁵I, ³²P, ³⁵S, ¹⁴C and ³H, ligands which bind to labeled antiligands (e.g., antibodies), fluorophores, chemiluminescent agents, enzymes, and antiligands which can serve as specific binding pair members for a labeled ligand. The choice of label depends on the sensitivity required, ease of conjugation with the primer, stability requirements, and available instrumentation. Methods for labeling polypeptides are well known in the art. See Ausubel (1992), supra; Ausubel (1999), supra.

[0097] The term “fusion protein” refers to polypeptides of the present invention coupled to a heterologous amino acid sequence. Fusion proteins are useful because they can be constructed to contain two or more desired functional elements from two or more different proteins. A fusion protein comprises at least 10 contiguous amino acids from a polypeptide of interest, more preferably at least 20 or 30 amino acids, even more preferably at least 40, 50 or 60 amino acids, yet more preferably at least 75, 100 or 125 amino acids. Fusion proteins can be produced recombinantly by constructing a nucleic acid sequence that encodes the polypeptide or a fragment thereof in frame with a nucleic acid sequence encoding a different protein or peptide and then expressing the fusion protein. Alternatively, a fusion protein can be produced chemically by crosslinking the polypeptide or a fragment thereof to another protein.

[0098] The term “analog” refers to both polypeptide analogs and non-peptide analogs. The term “polypeptide analog” as used herein refers to a polypeptide that is comprised of a segment of at least 25 amino acids that has substantial identity to a portion of an amino acid sequence but which contains non-natural amino acids or non-natural inter-residue bonds. In a preferred embodiment, the analog has the same or similar biological activity as the native polypeptide. Typically, polypeptide analogs comprise a conservative amino acid substitution (or insertion or deletion) with respect to the naturally occurring sequence. Analogs typically are at least 20 amino acids long, preferably at least 50 amino acids long or longer, and can often be as long as a fall-length naturally occurring polypeptide.

[0099] The term “non-peptide analog” refers to a compound with properties that are analogous to those of a reference polypeptide. A non-peptide compound may also be termed a “peptide mimetic” or a “peptidomimetic.” Such compounds are often developed with the aid of computerized molecular modeling. Peptide mimetics that are structurally similar to useful peptides may be used to produce an equivalent effect. Generally, peptidomimetics are structurally similar to a paradigm polypeptide (i.e., a polypeptide that has a desired biochemical property or pharmacological activity), but have one or more peptide linkages optionally replaced by a linkage selected from the group consisting of: —CH₂NH—, —CH₂S—, —CH₂—CH₂—, —CH═CH— (cis and trans), —COCH₂—, —CH(OH)CH₂—, and —CH₂SO—, by methods well known in the art. Systematic substitution of one or more amino acids of a consensus sequence with a D-amino acid of the same type (e.g., D-lysine in place of L-lysine) may also be used to generate more stable peptides. In addition, constrained peptides comprising a consensus sequence or a substantially identical consensus sequence variation may be generated by methods known in the art (Rizo et al., Ann. Rev. Biochem. 61:387-418 (1992)). For example, one may add internal cysteine residues capable of forming intramolecular disulfide bridges which cyclize the peptide.

[0100] The term “mutant” or “mutein” when referring to a polypeptide of the present invention relates to an amino acid sequence containing substitutions, insertions or deletions of one or more amino acids compared to the amino acid sequence of a CSP. A mutein may have one or more amino acid point substitutions, in which a single amino acid at a position has been changed to another amino acid, one or more insertions and/or deletions, in which one or more amino acids are inserted or deleted, respectively, in the sequence of the naturally occurring protein, and/or truncations of the amino acid sequence at either or both the amino or carboxy termini. Further, a mutein may have the same or different biological activity as the naturally occurring protein. For instance, a mutein may have an increased or decreased biological activity. A mutein has at least 50% sequence similarity to the wild type protein, preferred is 60% sequence similarity, more preferred is 70% sequence similarity. Even more preferred are muteins having 80%, 85% or 90% sequence similarity to a CSP. In an even more preferred embodiment, a mutein exhibits 95% sequence identity, even more preferably 97%, even more preferably 98% and even more preferably 99%. Sequence similarity may be measured by any common sequence analysis algorithm, such as GAP or BESTFIT or other variation Smith-Waterman alignment. See, T. F. Smith and M. S. Waterman, J. Mol. Biol. 147:195-197 (1981) and W. R. Pearson, Genomics 11:635-650 (1991).

[0101] Preferred amino acid substitutions are those which: (1) reduce susceptibility to proteolysis, (2) reduce susceptibility to oxidation, (3) alter binding affinity for forming protein complexes, (4) alter binding affinity or enzymatic activity, and (5) confer or modify other physicochemical or functional properties of such analogs. For example, single or multiple amino acid substitutions (preferably conservative amino acid substitutions) may be made in the naturally occurring sequence (preferably in the portion of the polypeptide outside the domain(s) forming intermolecular contacts. In a preferred embodiment, the amino acid substitutions are moderately conservative substitutions or conservative substitutions. In a more preferred embodiment, the amino acid substitutions are conservative substitutions. A conservative amino acid substitution should not substantially change the structural characteristics of the parent sequence (e.g., a replacement amino acid should not tend to disrupt a helix that occurs in the parent sequence, or disrupt other types of secondary structure that characterize the parent sequence). Examples of art-recognized polypeptide secondary and tertiary structures are described in Creighton (ed.), Proteins, Structures and Molecular Principles, W. H. Freeman and Company (1984); Branden et al. (ed.), Introduction to Protein Structure, Garland Publishing (1991); Thornton et al., Nature 354:105-106 (1991).

[0102] As used herein, the twenty conventional amino acids and their abbreviations follow conventional usage. See Golub et al., (eds.), Immunology—A Synthesis 2^{nd} Ed., Sinauer Associates (1991). Stereoisomers (e.g., D-amino acids) of the twenty conventional amino acids, unnatural amino acids such as α-,α-disubstituted amino acids, N-alkyl amino acids, and other unconventional amino acids may also be suitable components for polypeptides of the present invention. Examples of unconventional amino acids include: 4-hydroxyproline, γ-carboxyglutamate, ε-N,N,N-trimethyllysine, ε-N-acetyllysine, O-phosphoserine, N-acetylserine, N-formylmethionine, 3-methylhistidine, 5-hydroxylysine, s-N-methylarginine, and other similar amino acids and imino acids (e.g., 4-hydroxyproline). In the polypeptide notation used herein, the lefthand direction is the amino terminal direction and the right hand direction is the carboxy-terminal direction, in accordance with standard usage and convention.

[0103] By “homology” or “homologous” when referring to a polypeptide of the present invention it is meant polypeptides from different organisms with a similar sequence to the encoded amino acid sequence of a CSP and a similar biological activity or function. Although two polypeptides are said to be “homologous,” this does not imply that there is necessarily an evolutionary relationship between the polypeptides. Instead, the term “homologous” is defined to mean that the two polypeptides have similar amino acid sequences and similar biological activities or functions. In a preferred embodiment, a homologous polypeptide is one that exhibits 50% sequence similarity to CSP, preferred is 60% sequence similarity, more preferred is 70% sequence similarity. Even more preferred are homologous polypeptides that exhibit 80%, 85% or 90% sequence similarity to a CSP. In yet a more preferred embodiment, a homologous polypeptide exhibits 95%, 97%, 98% or 99% sequence similarity.

[0104] When “sequence similarity” is used in reference to polypeptides, it is recognized that residue positions that are not identical often differ by conservative amino acid substitutions. In a preferred embodiment, a polypeptide that has “sequence similarity” comprises conservative or moderately conservative amino acid substitutions. A “conservative amino acid substitution” is one in which an amino acid residue is substituted by another amino acid residue having a side chain (R group) with similar chemical properties (e.g., charge or hydrophobicity). In general, a conservative amino acid substitution will not substantially change the functional properties of a protein. In cases where two or more amino acid sequences differ from each other by conservative substitutions, the percent sequence identity or degree of similarity may be adjusted upwards to correct for the conservative nature of the substitution. Means for making this adjustment are well known to those of skill in the art. See, e.g., Pearson, Methods Mol. Biol. 24: 307-31 (1994).

[0105] For instance, the following six groups each contain amino acids that are conservative substitutions for one another:

[0106] 1) Serine (S), Threonine (T);

[0107] 2) Aspartic Acid (D), Glutamic Acid (E);

[0108] 3) Asparagine (N), Glutamine (Q);

[0109] 4) Arginine (R), Lysine (K);

[0110] 5) Isoleucine (I), Leucine (L), Methionine (M), Alanine (A), Valine (V), and

[0111] 6) Phenylalanine (F), Tyrosine (Y), Tryptophan (W).

[0112] Alternatively, a conservative replacement is any change having a positive value in the PAM250 log-likelihood matrix disclosed in Gonnet et al., Science 256: 1443-45 (1992). A “moderately conservative” replacement is any change having a nonnegative value in the PAM250 log-likelihood matrix.

[0113] Sequence similarity for polypeptides, which is also referred to as sequence identity, is typically measured using sequence analysis software. Protein analysis software matches similar sequences using measures of similarity assigned to various substitutions, deletions and other modifications, including conservative amino acid substitutions. For instance, GCG contains programs such as “Gap” and “Bestfit” which can be used with default parameters to determine sequence homology or sequence identity between closely related polypeptides, such as homologous polypeptides from different species of organisms or between a wild type protein and a mutein thereof. See, e.g., GCG Version 6.1. Other programs include FASTA, discussed supra.

[0114] A preferred algorithm when comparing a sequence of the invention to a database containing a large number of sequences from different organisms is the computer program BLAST, especially blastp or tblastn. See, e.g., Altschul et al., J. Mol. Biol. 215: 403-410 (1990); Altschul et al., Nucleic Acids Res. 25:3389-402 (1997). Preferred parameters for blastp are:

[0115] Expectation value: 10 (default)

[0116] Filter: seg (default)

[0117] Cost to open a gap: 11 (default)

[0118] Cost to extend a gap: 1 (default

[0119] Max. alignments: 100 (default)

[0120] Word size: 11 (default)

[0121] No. of descriptions: 100 (default)

[0122] Penalty Matrix: BLOSUM62

[0123] The length of polypeptide sequences compared for homology will generally be at least about 16 amino acid residues, usually at least about 20 residues, more usually at least about 24 residues, typically at least about 28 residues, and preferably more than about 35 residues. When searching a database containing sequences from a large number of different organisms, it is preferable to compare amino acid sequences.

[0124] Algorithms other than blastp for database searching using amino acid sequences are known in the art. For instance, polypeptide sequences can be compared using FASTA, a program in GCG Version 6.1. FASTA (e.g., FASTA2 and FASTA3) provides alignments and percent sequence identity of the regions of the best overlap between the query and search sequences (Pearson (1990), supra; Pearson (2000), supra. For example, percent sequence identity between amino acid sequences can be determined using FASTA with its default or recommended parameters (a word size of 2 and the PAM250 scoring matrix), as provided in GCG Version 6.1.

[0125] An “antibody” refers to an intact immunoglobulin, or to an antigen-binding portion thereof that competes with the intact antibody for specific binding to a molecular species, e.g., a polypeptide of the instant invention. Antigen-binding portions may be produced by recombinant DNA techniques or by enzymatic or chemical cleavage of intact antibodies. Antigen-binding portions include, inter alia, Fab, Fab′, F(ab′)₂, Fv, dAb, and complementarity determining region (CDR) fragments, single-chain antibodies (scFv), chimeric antibodies, diabodies and polypeptides that contain at least a portion of an immunoglobulin that is sufficient to confer specific antigen binding to the polypeptide. A Fab fragment is a monovalent fragment consisting of the VL, VH, CL and CH1 domains; a F(ab′)₂ fragment is a bivalent fragment comprising two Fab fragments linked by a disulfide bridge at the hinge region; a Fd fragment consists of the VH and CH1 domains; a Fv fragment consists of the VL and VH domains of a single arm of an antibody; and a dAb fragment consists of a VH domain. See, e.g., Ward et al., Nature 341: 544-546 (1989).

[0126] By “bind specifically” and “specific binding” as used herein it is meant the ability of the antibody to bind to a first molecular species in preference to binding to other molecular species with which the antibody and first molecular species are admixed. An antibody is said to “recognize” a first molecular species when it can bind specifically to that first molecular species.

[0127] A single-chain antibody (scFv) is an antibody in which VL and VH regions are paired to form a monovalent molecule via a synthetic linker that enables them to be made as a single protein chain. See, e.g., Bird et al., Science 242: 423-426 (1988); Huston et al., Proc. Natl. Acad. Sci. USA 85: 5879-5883 (1988). Diabodies are bivalent, bispecific antibodies in which VH and VL domains are expressed on a single polypeptide chain, but using a linker that is too short to allow for pairing between the two domains on the same chain, thereby forcing the domains to pair with complementary domains of another chain and creating two antigen binding sites. See e.g., Holliger et al., Proc. Natl. Acad. Sci. USA 90: 6444-6448 (1993); Poljak et al., Structure 2: 1121-1123 (1994). One or more CDRs may be incorporated into a molecule either covalently or noncovalently to make it an immunoadhesin. An immunoadhesin may incorporate the CDR(s) as part of a larger polypeptide chain, may covalently link the CDR(s) to another polypeptide chain, or may incorporate the CDR(s) noncovalently. The CDRs permit the immunoadhesin to specifically bind to a particular antigen of interest. A chimeric antibody is an antibody that contains one or more regions from one antibody and one or more regions from one or more other antibodies.

[0128] An antibody may have one or more binding sites. If there is more than one binding site, the binding sites may be identical to one another or may be different. For instance, a naturally occurring immunoglobulin has two identical binding sites, a single-chain antibody or Fab fragment has one binding site, while a “bispecific” or “bifunctional” antibody has two different binding sites.

[0129] An “isolated antibody” is an antibody that (1) is not associated with naturally-associated components, including other naturally-associated antibodies, that accompany it in its native state, (2) is free of other proteins from the same species, (3) is expressed by a cell from a different species, or (4) does not occur in nature. It is known that purified proteins, including purified antibodies, may be stabilized with non-naturally-associated components. The non-naturally-associated component may be a protein, such as albumin (e.g., BSA) or a chemical such as polyethylene glycol (PEG).

[0130] A “neutralizing antibody” or “an inhibitory antibody” is an antibody that inhibits the activity of a polypeptide or blocks the binding of a polypeptide to a ligand that normally binds to it. An “activating antibody” is an antibody that increases the activity of a polypeptide.

[0131] The term “epitope” includes any protein determinant capable of specific binding to an immunoglobulin or T-cell receptor. Epitopic determinants usually consist of chemically active surface groupings of molecules such as amino acids or sugar side chains and usually have specific three-dimensional structural characteristics, as well as specific charge characteristics. An antibody is said to specifically bind an antigen when the dissociation constant is less than 1 μM, preferably less than 100 nM and most preferably less than 10 nM.

[0132] The term “patient” includes human and veterinary subjects.

[0133] Throughout this specification and claims, the word “comprise,” or variations such as “comprises” or “comprising,” will be understood to imply the inclusion of a stated integer or group of integers but not the exclusion of any other integer or group of integers.

[0134] The term “colon specific” refers to a nucleic acid molecule or polypeptide that is expressed predominantly in the colon as compared to other tissues in the body. In a preferred embodiment, a “colon specific” nucleic acid molecule or polypeptide is detected at a level that is 1.5-fold higher than any other tissue in the body. In a more preferred embodiment, the “colon specific” nucleic acid molecule or polypeptide is detected at a level that is 2-fold higher than any other tissue in the body, more preferably 5-fold higher, still more preferably at least 10-fold, 15-fold, 20-fold, 25-fold, 50-fold or 100-fold higher than any other tissue in the body. Nucleic acid molecule levels may be measured by nucleic acid hybridization, such as Northern blot hybridization, or quantitative PCR. Polypeptide levels may be measured by any method known to accurately quantitate protein levels, such as Western blot analysis.

Nucleic Acid Molecules, Regulatory Sequences, Vectors, Host Cells and Recombinant Methods of Making Polypeptides

[0135] Nucleic Acid Molecules

[0136] One aspect of the invention provides isolated nucleic acid molecules that are specific to the colon or to colon cells or tissue or that are derived from such nucleic acid molecules. These isolated colon specific nucleic acids (CSNAs) may comprise cDNA genomic DNA, RNA, or a combination thereof, a fragment of one of these nucleic acids, or may be a non-naturally occurring nucleic acid molecule. A CSNA may be derived from an animal. In a preferred embodiment, the CSNA is derived from a human or other mammal. In a more preferred embodiment, the CSNA is derived from a human or other primate. In an even more preferred embodiment, the CSNA is derived from a human.

[0137] In a preferred embodiment, the nucleic acid molecule encodes a polypeptide that is specific to colon, a colon-specific polypeptide (CSP). In a more preferred embodiment, the nucleic acid molecule encodes a polypeptide that comprises an amino acid sequence of SEQ ID NO: 95-248. In another highly preferred embodiment, the nucleic acid molecule comprises a nucleic acid sequence of SEQ ID NO: 1-94. Nucleotide sequences of the instantly-described nucleic acid molecules were determined by assembling several DNA molecules from either public or proprietary databases. Some of the underlying DNA sequences are the result, directly or indirectly, of at least one enzymatic polymerization reaction (e.g., reverse transcription and/or polymerase chain reaction) using an automated sequencer (such as the MegaBACE™ 1000, Amersham Biosciences, Sunnyvale, Calif., USA).

[0138] Nucleic acid molecules of the present invention may also comprise sequences that selectively hybridize to a nucleic acid molecule encoding a CSNA or a complement or antisense thereof. The hybridizing nucleic acid molecule may or may not encode a polypeptide or may or may not encode a CSP. However, in a preferred embodiment, the hybridizing nucleic acid molecule encodes a CSP. In a more preferred embodiment, the invention provides a nucleic acid molecule that selectively hybridizes to a nucleic acid molecule or the antisense sequence of a nucleic acid molecule that encodes a polypeptide comprising an amino acid sequence of SEQ ID NO: 95-248. In an even more preferred embodiment, the invention provides a nucleic acid molecule that selectively hybridizes to a nucleic acid molecule comprising the nucleic acid sequence of SEQ ID NO: 1-94 or the antisense sequence thereof. Preferably, the nucleic acid molecule selectively hybridizes to a nucleic acid molecule or the antisense sequence of a nucleic acid molecule encoding a CSP under low stringency conditions. More preferably, the nucleic acid molecule selectively hybridizes to a nucleic acid molecule or the antisense sequence of a nucleic acid molecule encoding a CSP under moderate stringency conditions. Most preferably, the nucleic acid molecule selectively hybridizes to a nucleic acid molecule or the antisense sequence of a nucleic acid molecule encoding a CSP under high stringency conditions. In a preferred embodiment, the nucleic acid molecule hybridizes under low, moderate or high stringency conditions to a nucleic acid molecule or the antisense sequence of a nucleic acid molecule encoding a polypeptide comprising an amino acid sequence of SEQ ID NO: 95-248. In a more preferred embodiment, the nucleic acid molecule hybridizes under low, moderate or high stringency conditions to a nucleic acid molecule or the antisense sequence of a nucleic acid molecule comprising a nucleic acid sequence selected from SEQ ID NO: 1-94.

[0139] Nucleic acid molecules of the present invention may also comprise nucleic acid sequences that exhibit substantial sequence similarity to a nucleic acid encoding a CSP or a complement of the encoding nucleic acid molecule. In this embodiment, it is preferred that the nucleic acid molecule exhibit substantial sequence similarity to a nucleic acid molecule encoding human CSP. More preferred is a nucleic acid molecule exhibiting substantial sequence similarity to a nucleic acid molecule encoding a polypeptide having an amino acid sequence of SEQ ID NO: 95-248. By substantial sequence similarity it is meant a nucleic acid molecule having at least 60%, more preferably at least 70%, even more preferably at least 80% and even more preferably at least 85% sequence identity with a nucleic acid molecule encoding a CSP, such as a polypeptide having an amino acid sequence of SEQ ID NO: 95-248. In a more preferred embodiment, the similar nucleic acid molecule is one that has at least 90%, more preferably at least 95%, more preferably at least 97%, even more preferably at least 98%, and still more preferably at least 99% sequence identity with a nucleic acid molecule encoding a CSP. Most preferred in this embodiment is a nucleic acid molecule that has at least 99.5%, 99.6%, 99.7%, 99.8% or 99.9% sequence identity with a nucleic acid molecule encoding a CSP.

[0140] The nucleic acid molecules of the present invention are also inclusive of those exhibiting substantial sequence similarity to a CSNA or its complement In this embodiment, it is preferred that the nucleic acid molecule exhibit substantial sequence similarity to a nucleic acid molecule having a nucleic acid sequence of SEQ ID NO: 1-94. By substantial sequence similarity it is meant a nucleic acid molecule that has at least 60%, more preferably at least 70%, even more preferably at least 80% and even more preferably at least 85% sequence identity with a CSNA, such as one having a nucleic acid sequence of SEQ ID NO: 1-94. More preferred is a nucleic acid molecule that has at least 90%, more preferably at least 95%, more preferably at least 97%, even more preferably at least 98%, and still more preferably at least 99% sequence identity with a CSNA. Most preferred is a nucleic acid molecule that has at least 99.5%, 99.6%, 99.7%, 99.8% or 99.9% sequence identity with a CSNA.

[0141] Nucleic acid molecules that exhibit substantial sequence similarity are inclusive of sequences that exhibit sequence identity over their entire length to a CSNA or to a nucleic acid molecule encoding a CSP, as well as sequences that are similar over only a part of its length. In this case, the part is at least 50 nucleotides of the CSNA or the nucleic acid molecule encoding a CSP, preferably at least 100 nucleotides, more preferably at least 150 or 200 nucleotides, even more preferably at least 250 or 300 nucleotides, still more preferably at least 400 or 500 nucleotides.

[0142] The substantially similar nucleic acid molecule may be a naturally occurring one that is derived from another species, especially one derived from another primate, wherein the similar nucleic acid molecule encodes an amino acid sequence that exhibits significant sequence identity to that of SEQ ID NO: 95-248 or demonstrates significant sequence identity to the nucleotide sequence of SEQ ID NO: 1-94. The similar nucleic acid molecule may also be a naturally occurring nucleic acid molecule from a human, when the CSNA is a member of a gene family. The similar nucleic acid molecule may also be a naturally occurring nucleic acid molecule derived from a non-primate, mammalian species, including without limitation, domesticated species, e.g., dog, cat, mouse, rat, rabbit, hamster, cow, horse and pig; and wild animals, e.g., monkey, fox, lions, tigers, bears, giraffes, zebras, etc. The substantially similar nucleic acid molecule may also be a naturally occurring nucleic acid molecule derived from a non-mammalian species, such as birds or reptiles. The naturally occurring substantially similar nucleic acid molecule may be isolated directly from humans or other species. In another embodiment, the substantially similar nucleic acid molecule may be one that is experimentally produced by random mutation of a nucleic acid molecule. In another embodiment, the substantially similar nucleic acid molecule may be one that is experimentally produced by directed mutation of a CSNA. In a preferred embodiment, the substantially similar nucleic acid molecule is a CSNA.

[0143] The nucleic acid molecules of the present invention are also inclusive of allelic variants of a CSNA or a nucleic acid encoding a CSP. For example, single nucleotide polymorphisms (SNPs) occur frequently in eukaryotic genomes and the sequence determined from one individual of a species may differ from other allelic forms present within the population. More than 1.4 million SNPs have already been identified in the human genome, International Human Genome Sequencing Consortium, Nature 409: 860-921 (2001)—Variants with small deletions and insertions of more than a single nucleotide are also found in the general population, and often do not alter the function of the protein. In addition, amino acid substitutions occur frequently among natural allelic variants, and often do not substantially change protein function.

[0144] In a preferred embodiment, the allelic variant is a variant of a gene, wherein the gene is transcribed into a mRNA that encodes a CSP. In a more preferred embodiment, the gene is transcribed into a mRNA that encodes a CSP comprising an amino acid sequence of SEQ ID NO: 95-248. In another preferred embodiment, the allelic variant is a variant of a gene, wherein the gene is transcribed into a mRNA that is a CSNA. In a more preferred embodiment, the gene is transcribed into a mRNA that comprises the nucleic acid sequence of SEQ ID NO: 1-94. Also preferred is that the allelic variant be a naturally occurring allelic variant in the species of interest, particularly human.

[0145] Nucleic acid molecules of the present invention are also inclusive of nucleic acid sequences comprising a part of a nucleic acid sequence of the instant invention. The part may or may not encode a polypeptide, and may or may not encode a polypeptide that is a CSP. In a preferred embodiment, the part encodes a CSP. In one embodiment, the nucleic acid molecule comprises a part of a CSNA. In another embodiment, the nucleic acid molecule comprises a part of a nucleic acid molecule that hybridizes or exhibits substantial sequence similarity to a CSNA. In another embodiment, the nucleic acid molecule comprises a part of a nucleic acid molecule that is an allelic variant of a CSNA. In yet another embodiment, the nucleic acid molecule comprises a part of a nucleic acid molecule that encodes a CSP. A part comprises at least 10 nucleotides, more preferably at least 15, 17, 18, 20, 25, 30, 35, 40, 50, 60, 70, 80, 90, 100, 150, 200, 250, 300, 350, 400 or 500 nucleotides. The maximum size of a nucleic acid part is one nucleotide shorter than the sequence of the nucleic acid molecule encoding the full-length protein.

[0146] Nucleic acid molecules of the present invention are also inclusive of nucleic acid sequences that encode fusion proteins, homologous proteins, polypeptide fragments, muteins and polypeptide analogs, as described infra.

[0147] Nucleic acid molecules of the present invention are also inclusive of nucleic acid sequences containing modifications of the native nucleic acid molecule. Examples of such modifications include, but are not limited to, nonnative internucleoside bonds, post-synthetic modifications or altered nucleotide analogues. One having ordinary skill in the art would recognize that the type of modification that may be made will depend upon the intended use of the nucleic acid molecule. For instance, when the nucleic acid molecule is used as a hybridization probe, the range of such modifications will be limited to those that permit sequence-discriminating base pairing of the resulting nucleic acid. When used to direct expression of RNA or protein in vitro or in vivo, the range of such modifications will be limited to those that permit the nucleic acid to function properly as a polymerization substrate. When the isolated nucleic acid is used as a therapeutic agent, the modifications will be limited to those that do not confer toxicity upon the isolated nucleic acid.

[0148] Accordingly, in one embodiment, a nucleic acid molecule may include nucleotide analogues that incorporate labels that are directly detectable, such as radiolabels or fluorophores, or nucleotide analogues that incorporate labels that can be visualized in a subsequent reaction, such as biotin or various haptens. The labeled nucleic acid molecules are particularly useful as hybridization probes.

[0149] Common radiolabeled analogues include those labeled with ³³P, ³²P, and ³⁵S, such as α-³²P-dATP, α-³²P-dCTP, α-³²P-dGTP, α-³²P-dTTP, α-³²P-3′dATP, α³²P-ATP, α-³²P-CTP, α-³²P-GTP, α-³²P-UTP, α-³⁵S-dATP, γ-³⁵S-GTP, γ-³³P-dATP, and the like.

[0150] Commercially available fluorescent nucleotide analogues readily incorporated into the nucleic acids of the present invention include Cy3-dCTP, Cy3-dUTP, Cy5-dCT?, Cy3-dUTP (Amersham Biosciences, Piscataway, N.J., USA), fluorescein-12-dUTP, tetramethylrhodamine-6-dUTP, Texas Red®-5-dUTP, Cascade Blue®-7-dUTP, BODIPY® FL-14-dUTP, BODIPY® TMR-14-dUTP, BODIPY® TMR-14-dUTP, Rhodamine Green™-5-dUTP, Oregon Green® 488-5-dUTP, Texas Red®-12-dUTP, BODIPY® 630/650-14-dUTP, BODIPY® 650/665-14-dUTP, Alexa Fluor® 488-5-dUTP, Alexa Fluor® 532-5-dUTP, Alexa Fluor® 568-5-dUTP, Alexa Fluor® 594-5-dUTP, Alexa Fluor® 546-14-dUTP, fluorescein-12-UTI, tetramethylrhodamine-6-UTP, Texas Red®-5-UTP, Cascade Blue®-7-UTP, BODIPY® FL-14-UTP, BODIPY® TMR-14-UTP, BODIPY® TR-14-UTP, Rhodamine Green™-5-UTP, Alexa Fluor® 488-5-UTP, Alexa Fluor® 546-14-UTI (Molecular Probes, Inc. Eugene, Oreg., USA). One may also custom synthesize nucleotides having other fluorophores. See Henegariu et al., Nature Biotechnol. 18: 345-348 (2000).

[0151] Haptens that are commonly conjugated to nucleotides for subsequent labeling include biotin (biotin-11-dUTP, Molecular Probes, Inc., Eugene, Oreg., USA; biotin-21-UTP, biotin-21-dUTP, Clontech Laboratories, Inc., Palo Alto, Calif., USA), digoxigenin (DIG-11-dUTP, alkali labile, DIG-11-UT?, Roche Diagnostics Corp., Indianapolis, Ind., USA), and dinitrophenyl (dinitrophenyl-11-dUTP, Molecular Probes, Inc., Eugene, Oreg., USA).

[0152] Nucleic acid molecules of the present invention can be labeled by incorporation of labeled nucleotide analogues into the nucleic acid. Such analogues can be incorporated by enzymatic polymerization, such as by nick translation, random priming, polymerase chain reaction (PCR), terminal transferase tailing, and end-filling of overhangs, for DNA molecules, and in vitro transcription driven, e.g., from phage promoters, such as T7, T3, and SP6, for RNA molecules. Commercial kits are readily available for each such labeling approach. Analogues can also be incorporated during automated solid phase chemical synthesis. Labels can also be incorporated after nucleic acid synthesis, with the 5′ phosphate and 3′ hydroxyl providing convenient sites for post-synthetic covalent attachment of detectable labels.

[0153] Other post-synthetic approaches also permit internal labeling of nucleic acids. For example, fluorophores can be attached using a cisplatin reagent that reacts with the N7 of guanine residues (and, to a lesser extent, adenine bases) in DNA, RNA, and Peptide Nucleic Acids (PNA) to provide a stable coordination complex between the nucleic acid and fluorophore label (Universal Linkage System) (available from Molecular Probes, Inc., Eugene, Oreg., USA and Amersham Pharmacia Biotech, Piscataway, N.J., USA); see Alers et al., Genes, Chromosomes& Cancer 25: 301-305 (1999); Jelsma et al., J. NIH Res. 5: 82 (1994); Van Belkum et al., BioTechniques 16: 148-153 (1994). Alternatively, nucleic acids can be labeled using a disulfide-containing linker (FastTag™ Reagent, Vector Laboratories, Inc., Burlingame, Calif., USA) that is photo- or thermally coupled to the target nucleic acid using aryl azide chemistry; after reduction, a free thiol is available for coupling to a hapten, fluorophore, sugar, affinity ligand, or other marker.

[0154] One or more independent or interacting labels can be incorporated into the nucleic acid molecules of the present invention. For example, both a fluorophore and a moiety that in proximity thereto acts to quench fluorescence can be included to report specific hybridization through release of fluorescence quenching or to report exonucleotidic excision. See, e.g., Tyagi et al., Nature Biotechnol. 14: 303-308 (1996); Tyagi et al., Nature Biotechnol. 16: 49-53 (1998); Sokol et al., Proc. Natl. Acad. Sci. USA 95: 11538-11543 (1998); Kostrikis et al., Science 279: 1228-1229 (1998); Marras et al., Genet. Anal. 14: 151-156 (1999); Holland et al., Proc. Natl. Acad. Sci. USA 88: 7276-7280 (1991); Heid et al., Genome Res. 6(10): 986-94 (1996); Kuimelis et al., Nucleic Acids Symp. Ser. (37): 255-6 (1997); and U.S. Pat. Nos. 5,846,726, 5,925,517, 5,925,517, 5,723,591 and 5,538,848, the disclosures of which are incorporated herein by reference in their entireties.

[0155] Nucleic acid molecules of the present invention may also be modified by altering one or more native phosphodiester internucleoside bonds to more nuclease-resistant, internucleoside bonds. See Hartmann et al. (eds.), Manual of Antisense Methodology: Perspectives in Antisense Science, Kluwer Law International (1999); Stein et al. (eds.), Applied Antisense Oligonucleotide Technology, Wiley-Liss (1998); Chadwick et al. (eds.), Oligonucleotides as Therapeutic Agents—Symposium No. 209. John Wiley & Son Ltd (1997). Such altered internucleoside bonds are often desired for techniques or for targeted gene correction, Gamper et al., Nucl. Acids Res. 28(21): 4332-4339 (2000). For double-stranded RNA inhibition which may utilize either natural ds RNA or ds RNA modified in its, sugar, phosphate or base, see Hannon, Nature 418(11): 244-251 (2002); Fire et al. in WO 99/32619; Tuschl et al. in US2002/0086356; Kruetzer et al. in WO 00/44895, the disclosures of which are incorporated herein by reference in their entirety. For circular antisense, see Kool in U.S. Pat. No. 5,426,180, the disclosure of which is incorporated herein by reference in its entirety.

[0156] Modified oligonucleotide backbones include, without limitation, phosphorothioates, chiral phosphorothioates, phosphorodithioates, phosphotriesters, aminoalkylphosphotriesters, methyl and other alkyl phosphonates including 3′-alkylene phosphonates and chiral phosphonates, phosphinates, phosphoramidates including 3′-amino phosphoramidate and aminoalkylphosphoramidates, thionophosphoramidates, thionoalkylphosphonates, thionoalkylphosphotriesters, and boranophosphates having normal 3′-5′ linkages, 2′-5′ linked analogs of these, and those having inverted polarity wherein the adjacent pairs of nucleoside units are linked 3′-5′ to 5′-3′ or 2′-5′ to 5′-2′. Representative U.S. Patents that teach the preparation of the above phosphorus-containing linkages include, but are not limited to, U.S. Pat. Nos. 3,687,808; 4,469,863; 4,476,301; 5,023,243; 5,177,196; 5,188,897; 5,264,423; 5,276,019; 5,278,302; 5,286,717; 5,321,131; 5,399,676; 5,405,939; 5,453,496; 5,455,233; 5,466,677; 5,476,925; 5,519,126; 5,536,821; 5,541,306; 5,550,111; 5,563,253; 5,571,799; 5,587,361; and 5,625,050, the disclosures of which are incorporated herein by reference in their entireties. In a preferred embodiment, the modified internucleoside linkages may be used for antisense techniques.

[0157] Other modified oligonucleotide backbones do not include a phosphorus atom, but have backbones that are formed by short chain alkyl or cycloalkyl internucleoside linkages, mixed heteroatom and alkyl or cycloalkyl internucleoside linkages, or one or more short chain heteroatomic or heterocyclic internucleoside linkages. These include those having morpholino linkages (formed in part from the sugar portion of a nucleoside); siloxane backbones; sulfide, sulfoxide and sulfone backbones; formacetyl and thioformacetyl backbones; methylene formacetyl and thioformacetyl backbones; alkene containing backbones; sulfamate backbones; methyleneimino and methylenehydrazino backbones; sulfonate and sulfonamide backbones; amide backbones; and others having mixed N, O, S and CH₂ component parts. Representative U.S. patents that teach the preparation of the above backbones include, but are not limited to, U.S. Pat. Nos. 5,034,506; 5,166,315; 5,185,444; 5,214,134; 5,216,141; 5,235,033; 5,264,562; 5,264,564; 5,405,938; 5,434,257; 5,466,677; 5,476,967; 5,489,677; 5,541,307; 5,561,225; 5,596,086; 5,602,240; 5,610,289; 5,602,240; 5,608,046; 5,610,289; 5,618,704; 5,623,070; 5,663,312; 5,633,360; 5,677,437 and 5,677,439; the disclosures of which are incorporated herein by reference in their entireties.

[0158] In other preferred nucleic acid molecules, both the sugar and the internucleoside linkage are replaced with novel groups, such as peptide nucleic acids (PNA). In PNA compounds, the phosphodiester backbone of the nucleic acid is replaced with an amide-containing backbone, in particular by repeating N-(2-aminoethyl) glycine units linked by amide bonds. Nucleobases are bound directly or indirectly to aza nitrogen atoms of the amide portion of the backbone, typically by methylene carbonyl linkages. PNA can be synthesized using a modified peptide synthesis protocol. PNA oligomers can be synthesized by both Fmoc and tboc methods. Representative U.S. patents that teach the preparation of PNA compounds include, but are not limited to, U.S. Pat. Nos. 5,539,082; 5,714,331; and 5,719,262, each of which is herein incorporated by reference in its entirety. Automated PNA synthesis is readily achievable on commercial synthesizers (see, e.g., “PNA User's Guide,” Rev. 2, February 1998, Perseptive Biosystems Part No. 60138, Applied Biosystems, Inc., Foster City, Calif.). PNA molecules are advantageous for a number of reasons. First, because the PNA backbone is uncharged, PNA/DNA and PNA/RNA duplexes have a higher thermal stability than is found in DNA/DNA and DNA/RNA duplexes. The Tm of a PNA/DNA or PNA/RNA duplex is generally 1° C. higher per base pair than the Tm of the corresponding DNA/DNA or DNA/RNA duplex (in 100 mM NaCl). Second, PNA molecules can also form stable PNA/DNA complexes at low ionic strength, under conditions in which DNA/DNA duplex formation does not occur. Third, PNA also demonstrates greater specificity in binding to complementary DNA because a PNA/DNA mismatch is more destabilizing than DNA/DNA mismatch. A single mismatch in mixed a PNA/DNA 15-mer lowers the Tm by 8-20° C. (15° C. on average). In the corresponding DNA/DNA duplexes, a single mismatch lowers the Tm by 4-16° C. (11° C. on average). Because PNA probes can be significantly shorter than DNA probes, their specificity is greater. Fourth, PNA oligomers are resistant to degradation by enzymes, and the lifetime of these compounds is extended both in vivo and in vitro because nucleases and proteases do not recognize the PNA polyamide backbone with nucleobase sidechains. See, e.g., Ray et al., FASEB J. 14(9): 1041-60 (2000); Nielsen et al., Pharmacol Toxicol. 86(1): 3-7 (2000); Larsen et al., Biochim Biophys Acta. 1489(1): 159-66 (1999); Nielsen, Curr. Opin. Struct. Biol. 9(3): 353-7 (1999), and Nielsen, Curr. Opin. Biotechnol. 10(1): 71-5 (1999).

[0159] Nucleic acid molecules may be modified compared to their native structure throughout the length of the nucleic acid molecule or can be localized to discrete portions thereof. As an example of the latter, chimeric nucleic acids can be synthesized that have discrete DNA and RNA domains and that can be used for targeted gene repair and modified PCR reactions, as further described in, Misra et al., Biochem. 37: 1917-1925 (1998); and Finn et al., Nucl. Acids Res. 24: 3357-3363 (1996), and U.S. Pat. Nos. 5,760,012 and 5,731,181, the disclosures of which are incorporated herein by reference in their entireties.

[0160] Unless otherwise specified, nucleic acid molecules of the present invention can include any topological conformation appropriate to the desired use; the term thus explicitly comprehends, among others, single-stranded, double-stranded, triplexed, quadruplexed, partially double-stranded, partially-triplexed, partially-quadruplexed, branched, hairpinned, circular, and padlocked conformations. Padlocked conformations and their utilities are further described in Banér et al., Curr. Opin. Biotechnol. 12: 11-15 (2001); Escude et al., Proc. Natl. Acad. Sci. USA 14: 96(19):10603-7 (1999); and Nilsson et al., Science 265(5181): 2085-8 (1994). Triplexed and quadruplexed conformations, and their utilities, are reviewed in Praseuth et al., Biochim. Biophys. Acta. 1489(1): 181-206 (1999); Fox, Curr. Med. Chem. 7(1): 17-37 (2000); Kochetkova et al., Methods Mol. Biol. 130: 189-201 (2000); Chan et al., J. Mol. Med. 75(4): 267-82 (1997); Rowley et al., Mol Med 5(10): 693-700 (1999); Kool, Annu Rev Biophys Biomol Struct. 25: 1-28 (1996).

[0161] SNP Polymorphisms

[0162] Commonly, sequence differences between individuals involve differences in single nucleotide positions. SNPs may account for 90% of human DNA polymorphism. Collins et al., 8 Genome Res. 1229-31 (1998). SNPs include single base pair positions in genomic DNA at which different sequence alternatives (alleles) exist in a population. In addition, the least frequent allele generally must occur at a frequency of 1% or greater. DNA sequence variants with a reasonably high population frequency are observed approximately every 1,000 nucleotide across the genome, with estimates as high as 1 SNP per 350 base pairs. Wang et al., 280 Science 1077-82 (1998); Harding et al., 60 Am. J. Human Genet. 772-89 (1997); Taillon-Miller et al., 8 Genome Res. 748-54 (1998); Cargill et al., 22 Nat. Genet. 231-38 (1999); and Semple et al., 16 Bioinform. Disc. Note 735-38 (2000). The frequency of SNPs varies with the type and location of the change. In base substitutions, two-thirds of the substitutions involve the C-T and G-A type. This variation in frequency can be related to 5-methylcytosine deamination reactions that occur frequently, particularly at CpG dinucleotides. Regarding location, SNPs occur at a much higher frequency in non-coding regions than in coding regions. Information on over one million variable sequences is already publicly available via the Internet and more such markers are available from commercial providers of genetic information. Kwok and Gu, 5 Med. Today 538-53 (1999).

[0163] Several definitions of SNPs exist See, e.g., Brooks, 235 Gene 177-86 (1999). As used herein, the term “single nucleotide polymorphism” or “SNP” includes all single base variants, thus including nucleotide insertions and deletions in addition to single nucleotide substitutions. There are two types of nucleotide substitutions. A transition is the replacement of one purine by another purine or one pyrimidine by another pyrimidine. A transversion is the replacement of a purine for a pyrimidine, or vice versa.

[0164] Numerous methods exist for detecting SNPs within a nucleotide sequence. A review of many of these methods can be found in Landegren et al., 8 Genome Res. 769-76 (1998). For example, a SNP in a genomic sample can be detected by preparing a Reduced Complexity Genome (RCG) from the genomic sample, then analyzing the RCG for the presence or absence of a SNP. See, e.g., WO 00/18960 which is herein incorporated by reference in its entirety. Multiple SNPs in a population of target polynucleotides in parallel can be detected using, for example, the methods of WO 00/50869 which is herein incorporated by reference in its entirety. Other SNP detection methods include the methods of U.S. Pat. Nos. 6,297,018 and 6,322,980 which are herein incorporated by reference in their entirety. Furthermore, SNPs can be detected by restriction fragment length polymorphism (RFLP) analysis. See, e.g., U.S. Pat Nos. 5,324,631; 5,645,995 which are herein incorporated by reference in their entirety. RFLP analysis of SNPs, however, is limited to cases where the SNP either creates or destroys a restriction enzyme cleavage site. SNPs can also be detected by direct sequencing of the nucleotide sequence of interest. In addition, numerous assays based on hybridization have also been developed to detect SNPs and mismatch distinction by polymerases and ligases. Several web sites provide information about SNPs including Ensembl on the World Wide Web at ensemble.org, Sanger Institute on the World Wide Web at sanger.ac.uk/genetics/exon/, National Center for Biotechnology Information (NCBI) on the World Wide Web at ncbi.nlm.nih.gov/SNP/, The SNP Consortium Ltd. on the World Wide Web at snp.cshl.org. The chromosomal locations for the compositions disclosed herein are provided below. In addition, one of ordinary skill in the art could use a BLAST against the genome or any of the databases cited above to find the chromosomal location. Another a preferred method to find the genomic coordinates and associated SNPs would be to use the BLAT tool (genome.ucsc.edu, Kent et al. 2001, The Human Genome Browser at UCSC, Genome Research 996-1006 or Kent 2002 BLAT—The BLAST-Like Alignment Tool Genome Reseach, 1-9). All web sites above were accessed Dec. 3, 2003.

[0165] RNA interference refers to the process of sequence-specific post transcriptional gene silencing in animals mediated by short interfering RNAs (siRNA). Fire et al., 1998, Nature, 391, 806. The corresponding process in plants is commonly referred to as post transcriptional gene silencing or RNA silencing and is also referred to as quelling in fungi. The process of post transcriptional gene silencing is thought to be an evolutionarily conserved cellular defense mechanism used to prevent the expression of foreign genes which is commonly shared by diverse flora and phyla. Fire et al., 1999, Trends Genet., 15, 358. Such protection from foreign gene expression may have evolved in response to the production of double-stranded RNAs (dsRNA) derived from viral infection or the random integration of transposon elements into a host genome via a cellular response that specifically destroys homologous single-stranded RNA or viral genomic RNA. The presence of dsRNA in cells triggers the RNAi response though a mechanism that has yet to be fully characterized. This mechanism appears to be different from the interferon response that results from dsRNA mediated activation of protein kinase PKR and 2′,5′-oligoadenylate synthetase resulting in non-specific cleavage of mRNA by ribonuclease L.

[0166] The presence of long dsRNAs in cells stimulates the activity of a ribonuclease III enzyme referred to as dicer. Dicer is involved in the processing of the dsRNA into short pieces of dsRNA known as short interfering RNAs (siRNA). Berstein et al., 2001, Nature, 409, 363. Short interfering RNAs derived from dicer activity are typically about 21-23 nucleotides in length and comprise about 19 base pair duplexes. Dicer has also been implicated in the excision of 21 and 22 nucleotide small temporal RNAs (stRNA) from precursor RNA of conserved structure that are implicated in translational control. Hutvagner et al., 2001, Science, 293, 834. The RNAi response also features an endonuclease complex containing a siRNA, commonly referred to as an RNA-induced silencing complex (RISC), which mediates cleavage of single stranded RNA having sequence complementary to the antisense strand of the siRNA duplex. Cleavage of the target RNA takes place in the middle of the region complementary to the antisense strand of the siRNA duplex. Elbashir et al., 2001, Genes Dev., 15, 188.

[0167] Short interfering RNA mediated RNAi has been studied in a variety of systems. Fire et al., 1998, Nature, 391, 806, were the first to observe RNAi in C. Elegans. Wianny and Goetz, 1999, Nature Cell Biol., 2, 70, describe RNAi mediated by dsRNA in mouse embryos. Hammond et al., 2000, Nature, 404, 293, describe RNAi in Drosophila cells transfected with dsRNA. Elbashir et al., 2001, Nature, 411, 494, describe RNAi induced by introduction of duplexes of synthetic 21-nucleotide RNAs in cultured mammalian cells including human embryonic kidney and HeLa cells. Recent work in Drosophila embryonic lysates (Elbashir et al., 2001, EMBO J., 20, 6877) has revealed certain requirements for siRNA length, structure, chemical composition, and sequence that are essential to mediate efficient RNAi activity. These studies have shown that 21 nucleotide siRNA duplexes are most active when containing two nucleotide 3′-overhangs. Furthermore, complete substitution of one or both siRNA strands with 2′-deoxy (2′-H) or 2′-O-methyl nucleotides abolishes RNAi activity, whereas substitution of the 3′-terminal siRNA overhang nucleotides with deoxy nucleotides (2′-H) was shown to be tolerated. Single mismatch sequences in the center of the siRNA duplex were also shown to abolish RNAi activity. In addition, these studies also indicate that the position of the cleavage site in the target RNA is defined by the 5′-end of the siRNA guide sequence rather than the 3′-end. Elbashir et al., 2001, EMBO J., 20, 6877. Other studies have indicated that a 5′-phosphate on the target-complementary strand of a siRNA duplex is required for siRNA activity and that ATP is utilized to maintain the 5′-phosphate moiety on the siRNA. Nykanen et al., 2001, Cell, 107, 309.

[0168] Studies have shown that replacing the 3′-overhanging segments of a 21-mer siRNA duplex having 2 nucleotide 3′ overhangs with deoxyribonucleotides does not have an adverse effect on RNAi activity. Replacing up to 4 nucleotides on each end of the siRNA with deoxyribonucleotides has been reported to be well tolerated whereas complete substitution with deoxyribonucleotides results in no RNAi activity. Elbashir et al., 2001, EMBO J., 20, 6877. In addition, Elbashir et al., supra, also report that substitution of siRNA with 2′-O-methyl nucleotides completely abolishes RNAi activity. Li et al., WO 00/44914, and Beach et al., WO 01/68836 both suggest that siRNA “may include modifications to either the phosphate-sugar back bone or the nucleoside to include at least one of a nitrogen or sulfur heteroatom”, however neither application teaches to what extent these modifications are tolerated in siRNA molecules nor provide any examples of such modified siRNA. Kreutzer and Limmer, Canadian Patent Application No. 2,359,180, also describe certain chemical modifications for use in dsRNA constructs in order to counteract activation of double stranded RNA-dependent protein kinase PKR, specifically 2′-amino or 2′-O-methyl nucleotides, and nucleotides containing a 2′-O or 4′-C methylene bridge. However, Kreutzer and Limmer similarly fail to show to what extent these modifications are tolerated in siRNA molecules nor do they provide any examples of such modified siRNA.

[0169] Parrish et al., 2000, Molecular Cell, 6, 1977-1087, tested certain chemical modifications targeting the unc-22 gene in C. elegans using long (>25 nt) siRNA transcripts. The authors describe the introduction of thiophosphate residues into these siRNA transcripts by incorporating thiophosphate nucleotide analogs with T7 and T3 RNA polymerase and observed that “RNAs with two [phosphorothioate] modified bases also had substantial decreases in effectiveness as RNAi triggers; [phosphorothioate] modification of more than two residues greatly destabilized the RNAs in vitro and we were not able to assay interference activities.” Parrish et al. at 1081. The authors also tested certain modifications at the 2′-position of the nucleotide sugar in the long siRNA transcripts and observed that substituting deoxynucleotides for ribonucleotides “produced a substantial decrease in interference activity”, especially in the case of Uridine to Thymidine and/or Cytidine to deoxy-Cytidine substitutions. Parrish et al. In addition, the authors tested certain base modifications, including substituting 4-thiouracil, 5-bromouracil, 5-iodouracil, 3-(aminoallyl)uracil for uracil, and inosine for guanosine in sense and antisense strands of the siRNA, and found that whereas 4-thiouracil and 5-bromouracil were all well tolerated, inosine “produced a substantial decrease in interference activity” when incorporated in either strand. Incorporation of 5-iodouracil and 3-(aminoallyl)uracil in the antisense strand resulted in substantial decrease in RNAi activity as well.

[0170] Beach et al., WO 01/68836, describes specific methods for attenuating gene expression using endogenously derived dsRNA. Tuschl et al., WO 01/75164, describes a Drosophila in vitro RNAi system and the use of specific siRNA molecules for certain functional genomic and certain therapeutic applications; although Tuschl, 2001, Chem. Biochem., 2, 239-245, doubts that RNAi can be used to cure genetic diseases or viral infection due “to the danger of activating interferon response”. Li et al., WO 00/44914, describes the use of specific dsRNAs for use in attenuating the expression of certain target genes. Zemicka-Goetz et al., WO 01/36646, describes certain methods for inhibiting the expression of particular genes in mammalian cells using certain dsRNA molecules. Fire et al., WO 99/32619, U.S. Pat. No. 6,506,559, the contents of which are hereby incorporated by reference in their entirety, describes particular methods for introducing certain dsRNA molecules into cells for use in inhibiting gene expression. Plaetinck et al., WO 00/01846, describes certain methods for identifying specific genes responsible for conferring a particular phenotype in a cell using specific dsRNA molecules. Mello et al., WO 01/29058, describes the identification of specific genes involved in dsRNA mediated RNAi. Deschamps Depaillette et al., International PCT Publication No. WO 99/07409, describes specific compositions consisting of particular dsRNA molecules combined with certain anti-viral agents. Driscoll et al., International PCT Publication No. WO 01/49844, describes specific DNA constructs for use in facilitating gene silencing in targeted organisms. Parrish et al., 2000, Molecular Cell, 6, 1977-1087, describes specific chemically modified siRNA constructs targeting the unc-22 gene of C. elegans. Tuschl et al., International PCT Publication No. WO 02/44321, describe certain synthetic siRNA constructs.

[0171] Methods for Using Nucleic Acid Molecules as Probes and Primers

[0172] The isolated nucleic acid molecules of the present invention can be used as hybridization probes to detect, characterize, and quantify hybridizing nucleic acids in, and isolate hybridizing nucleic acids from, both genomic and transcript-derived nucleic acid samples. When free in solution, such probes are typically, but not invariably, detectably labeled; bound to a substrate, as in a microarray, such probes are typically, but not invariably unlabeled.

[0173] In one embodiment, the isolated nucleic acid molecules of the present invention can be used as probes to detect and characterize gross alterations in the gene of a CSNA, such as deletions, insertions, translocations, and duplications of the CSNA genomic locus through fluorescence in situ hybridization (FISH) to chromosome spreads. See, e.g., Andreeff et al. (eds.), Introduction to Fluorescence In Situ Hybridization: Principles and Clinical Applications, John Wiley & Sons (1999). The isolated nucleic acid molecules of the present invention can be used as probes to assess smaller genomic alterations using, e.g., Southern blot detection of restriction fragment length polymorphisms. The isolated nucleic acid molecules of the present invention can be used as probes to isolate genomic clones that include a nucleic acid molecule of the present invention, which thereafter can be restriction mapped and sequenced to identify deletions, insertions, translocations, and substitutions (single nucleotide polymorphisms, SNPs) at the sequence level. Alternatively, detection techniques such as molecular beacons may be used, see Kostrikis et al. Science 279:1228-1229 (1998).

[0174] The isolated nucleic acid molecules of the present invention can also be used as probes to detect, characterize, and quantify CSNA in, and isolate CSNA from, transcript-derived nucleic acid samples. In one embodiment, the isolated nucleic acid molecules of the present invention can be used as hybridization probes to detect, characterize by length, and quantify mRNA by Northern blot of total or poly-A⁺-selected RNA samples. In another embodiment, the isolated nucleic acid molecules of the present invention can be used as hybridization probes to detect, characterize by location, and quantify mRNA by in situ hybridization to tissue sections. See, e.g., Schwarchzacher et al., In Situ Hybridization, Springer-Verlag New York (2000). In another preferred embodiment, the isolated nucleic acid molecules of the present invention can be used as hybridization probes to measure the representation of clones in a cDNA library or to isolate hybridizing nucleic acid molecules acids from cDNA libraries, permitting sequence level characterization of mRNAs that hybridize to CSNAs, including, without limitations, identification of deletions, insertions, substitutions, truncations, alternatively spliced forms and single nucleotide polymorphisms. In yet another preferred embodiment, the nucleic acid molecules of the instant invention may be used in microarrays.

[0175] All of the aforementioned probe techniques are well within the skill in the art, and are described at greater length in standard texts such as Sambrook (2001), supra; Ausubel (1999), supra; and Walker et al. (eds.), The Nucleic Acids Protocols Handbook, Humana Press (2000).

[0176] In another embodiment, a nucleic acid molecule of the invention may be used as a probe or primer to identify and/or amplify a second nucleic acid molecule that selectively hybridizes to the nucleic acid molecule of the invention. In this embodiment, it is preferred that the probe or primer be derived from a nucleic acid molecule encoding a CSP. More preferably, the probe or primer is derived from a nucleic acid molecule encoding a polypeptide having an amino acid sequence of SEQ ID NO: 95-248. Also preferred are probes or primers derived from a CSNA. More preferred are probes or primers derived from a nucleic acid molecule having a nucleotide sequence of SEQ ID NO: 1-94.

[0177] In general, a probe or primer is at least 10 nucleotides in length, more preferably at least 12, more preferably at least 14 and even more preferably at least 16 or 17 nucleotides in length. In an even more preferred embodiment, the probe or primer is at least 18 nucleotides in length, even more preferably at least 20 nucleotides and even more preferably at least 22 nucleotides in length. Primers and probes may also be longer in length. For instance, a probe or primer may be 25 nucleotides in length, or may be 30, 40 or 50 nucleotides in length. Methods of performing nucleic acid hybridization using oligonucleotide probes are well known in the art. See, e.g., Sambrook et al., 1989, supra, Chapter 11 and pp. 11.31-11.32 and 11.40-11.44, which describes radiolabeling of short probes, and pp. 11.45-11.53, which describe hybridization conditions for oligonucleotide probes, including specific conditions for probe hybridization (pp. 11.50-11.51).

[0178] Methods of performing primer-directed amplification are also well known in the art. Methods for performing the polymerase chain reaction (PCR) are compiled, inter alia, in McPherson, PCR Basics: From Background to Bench, Springer Verlag (2000); Innis et al. (eds.), PCR Applications: Protocols for Functional Genomics, Academic Press (1999); Gelfand et al. (eds.), PCR Strategies, Academic Press (1998); Newton et al., PCR Springer-Verlag New York (1997); Burke (ed.), PCR: Essential Techniques, John Wiley & Son Ltd (1996); White (ed.), PCR Cloning Protocols: From Molecular Cloning to Genetic Engineering, Vol. 67, Humana Press (1996); and McPherson et al. (eds.), PCR 2: A Practical Approach, Oxford University Press, Inc. (1995). Methods for performing RT-PCR are collected, e.g., in Siebert et al. (eds.), Gene Cloning and Analysis by RT-PCR, Eaton Publishing Company/Bio Techniques Books Division, 1998; and Siebert (ed.), PCR Technique:RT-PCR. Eaton Publishing Company/BioTechniques Books (1995).

[0179] PCR and hybridization methods may be used to identify and/or isolate nucleic acid molecules of the present invention including allelic variants, homologous nucleic acid molecules and fragments. PCR and hybridization methods may also be used to identify, amplify and/or isolate nucleic acid molecules of the present invention that encode homologous proteins, analogs, fusion protein or muteins of the invention. Nucleic acid primers as described herein can be used to prime amplification of nucleic acid molecules of the invention, using transcript-derived or genomic DNA as the template.

[0180] These nucleic acid primers can also be used, for example, to prime single base extension (SBE) for SNP detection (See, e.g., U.S. Pat. No. 6,004,744, the disclosure of which is incorporated herein by reference in its entirety).

[0181] Isothermal amplification approaches, such as rolling circle amplification, are also now well-described. See, e.g., Schweitzer et al., Curr. Opin. Biotechnol. 12(1): 21-7 (2001); International Patent publications WO 97/19193 and WO 00/15779, and U.S. Pat. Nos. 5,854,033 and 5,714,320, the disclosures of which are incorporated herein by reference in their entireties. Rolling circle amplification can be combined with other techniques to facilitate SNP detection. See, e.g., Lizardi et al., Nature Genet. 19(3): 225-32 (1998).

[0182] Nucleic acid molecules of the present invention may be bound to a substrate either covalently or noncovalently. The substrate can be porous or solid, planar or non-planar, unitary or distributed. The bound nucleic acid molecules may be used as hybridization probes, and may be labeled or unlabeled. In a preferred embodiment, the bound nucleic acid molecules are unlabeled.

[0183] In one embodiment, the nucleic acid molecule of the present invention is bound to a porous substrate, e.g., a membrane, typically comprising nitrocellulose, nylon, or positively charged derivatized nylon. The nucleic acid molecule of the present invention can be used to detect a hybridizing nucleic acid molecule that is present within a labeled nucleic acid sample, e.g., a sample of transcript-derived nucleic acids. In another embodiment, the nucleic acid molecule is bound to a solid substrate, including, without limitation, glass, amorphous silicon, crystalline silicon or plastics. Examples of plastics include, without limitation, polymethylacrylic, polyethylene, polypropylene, polyacrylate, polymethylmethacrylate, polyvinylchloride, polytetrafluoroethylene, polystyrene, polycarbonate, polyacetal, polysulfone, celluloseacetate, cellulosenitrate, nitrocellulose, or mixtures thereof. The solid substrate may be any shape, including rectangular, disk-like and spherical. In a preferred embodiment, the solid substrate is a microscope slide or slide-shaped substrate.

[0184] The nucleic acid molecule of the present invention can be attached covalently to a surface of the support substrate or applied to a derivatized surface in a chaotropic agent that facilitates denaturation and adherence by presumed noncovalent interactions, or some combination thereof. The nucleic acid molecule of the present invention can be bound to a substrate to which a plurality of other nucleic acids are concurrently bound, hybridization to each of the plurality of bound nucleic acids being separately detectable. At low density, e.g. on a porous membrane, these substrate-bound collections are typically denominated macroarrays; at higher density, typically on a solid support, such as glass, these substrate bound collections of plural nucleic acids are colloquially termed microarrays. As used herein, the term microarray includes arrays of all densities. It is, therefore, another aspect of the invention to provide microarrays that comprise one or more of the nucleic acid molecules of the present invention.

[0185] In yet another embodiment, the invention is directed to single exon probes based on the CSNAs disclosed herein.

[0186] Expression Vectors, Host Cells and Recombinant Methods of Producing Polypeptides

[0187] Another aspect of the present invention provides vectors that comprise one or more of the isolated nucleic acid molecules of the present invention, and host cells in which such vectors have been introduced.

[0188] The vectors can be used, inter alia, for propagating the nucleic acid molecules of the present invention in host cells (cloning vectors), for shuttling the nucleic acid molecules of the present invention between host cells derived from disparate organisms (shuttle vectors), for inserting the nucleic acid molecules of the present invention into host cell chromosomes (insertion vectors), for expressing sense or antisense RNA transcripts of the nucleic acid molecules of the present invention in vitro or within a host cell, and for expressing polypeptides encoded by the nucleic acid molecules of the present invention, alone or as fusion proteins with heterologous polypeptides (expression vectors). Vectors are by now well known in the art, and are described, inter alia, in Jones et al. (eds.), Vectors: Cloning Applications: Essential Techniques (Essential Techniques Series), John Wiley & Son Ltd. (1998); Jones et al. (eds.), Vectors: Expression Systems: Essential Techniques (Essential Techniques Series), John Wiley & Son Ltd. (1998); Gacesa et al., Vectors: Essential Data, John Wiley & Sons Ltd. (1995); Cid-Arregui (eds.), Viral Vectors: Basic Science and Gene Therapy, Eaton Publishing Co. (2000); Sambrook (2001), supra; Ausubel (1999), supra. Furthermore, a variety of vectors are available commercially. Use of existing vectors and modifications thereof are well within the skill in the art. Thus, only basic features need be described here.

[0189] Nucleic acid sequences may be expressed by operatively linking them to an expression control sequence in an appropriate expression vector and employing that expression vector to transform an appropriate unicellular host. Expression control sequences are sequences that control the transcription, post-transcriptional events and translation of nucleic acid sequences. Such operative linking of a nucleic acid sequence of this invention to an expression control sequence, of course, includes, if not already part of the nucleic acid sequence, the provision of a translation initiation codon, ATG or GTG, in the correct reading frame upstream of the nucleic acid sequence.

[0190] A wide variety of host/expression vector combinations may be employed in expressing the nucleic acid sequences of this invention. Useful expression vectors, for example, may consist of segments of chromosomal, non-chromosomal and synthetic nucleic acid sequences.

[0191] In one embodiment, prokaryotic cells may be used with an appropriate vector. Prokaryotic host cells are often used for cloning and expression. In a preferred embodiment, prokaryotic host cells include E. coli, Pseudomonas, Bacillus and Streptomyces. In a preferred embodiment, bacterial host cells are used to express the nucleic acid molecules of the instant invention. Useful expression vectors for bacterial hosts include bacterial plasmids, such as those from E. coli, Bacillus or Streptomyces, including pBluescript, pGEX-2T, pUC vectors, col E1, pCR1, pBR322, pMB9 and their derivatives, wider host range plasmids, such as RP4, phage DNAs, e.g., the numerous derivatives of phage lambda, e.g., NM989, λGT10 and λGT11, and other phages, e.g., M13 and filamentous single stranded phage DNA. Where E. coli is used as host, selectable markers are, analogously, chosen for selectivity in gram negative bacteria: e.g., typical markers confer resistance to antibiotics, such as ampicillin, tetracycline, chloramphenicol, kanamycin, streptomycin and zeocin; auxotrophic markers can also be used.

[0192] In other embodiments, eukaryotic host cells, such as yeast, insect, mammalian or plant cells, may be used. Yeast cells, typically S. cerevisiae, are useful for eukaryotic genetic studies, due to the ease of targeting genetic changes by homologous recombination and the ability to easily complement genetic defects using recombinantly expressed proteins. Yeast cells are useful for identifying interacting protein components, e.g. through use of a two-hybrid system. In a preferred embodiment, yeast cells are useful for protein expression. Vectors of the present invention for use in yeast will typically, but not invariably, contain an origin of replication suitable for use in yeast and a selectable marker that is functional in yeast. Yeast vectors include Yeast Integrating plasmids (e.g., YIp5) and Yeast Replicating plasmids (the YRp and YEp series plasmids), Yeast Centromere plasmids (the YCp series plasmids), Yeast Artificial Chromosomes (YACs) which are based on yeast linear plasmids, denoted YLp, pGPD-2, 2μ plasmids and derivatives thereof, and improved shuttle vectors such as those described in Gietz et al., Gene, 74: 527-34 (1988) (YIplac, YEplac and YCplac). Selectable markers in yeast vectors include a variety of auxotrophic markers, the most common of which are (in Saccharomyces cerevisiae) URA3, HIS3, LEU2, TRP1 and LYS2, which complement specific auxotrophic mutations, such as ura3-52, his3-D1, leu2-D1, trp1-D1 and lys2-201.

[0193] Insect cells may be chosen for high efficiency protein expression. Where the host cells are from Spodoptera frugiperda, e.g., Sf9 and Sf21 cell lines, and expresSF™ cells Protein Sciences Corp., Meriden, Conn., USA), the vector replicative strategy is typically based upon the baculovirus life cycle. Typically, baculovirus transfer vectors are used to replace the wild-type AcMNPV polyhedrin gene with a heterologous gene of interest. Sequences that flank the polyhedrin gene in the wild-type genome are positioned 5′ and 3′ of the expression cassette on the transfer vectors. Following co-transfection with AcMNPV DNA, a homologous recombination event occurs between these sequences resulting in a recombinant virus carrying the gene of interest and the polyhedrin or p10 promoter. Selection can be based upon visual screening for lacZ fusion activity.

[0194] The host cells may also be mammalian cells, which are particularly useful for expression of proteins intended as pharmaceutical agents, and for screening of potential agonists and antagonists of a protein or a physiological pathway. Mammalian vectors intended for autonomous extrachromosomal replication will typically include a viral origin, such as the SV40 origin (for replication in cell lines expressing the large T-antigen, such as COS1 and COS7 cells), the papillomavirus origin, or the EBV origin for long term episomal replication (for use, e.g., in 293-EBNA cells, which constitutively express the EBV EBNA-1 gene product and adenovirus E1A). Vectors intended for integration, and thus replication as part of the mammalian chromosome, can, but need not, include an origin of replication functional in mammalian cells, such as the SV40 origin. Vectors based upon viruses, such as adenovirus, adeno-associated virus, vaccinia virus, and various mammalian retroviruses, will typically replicate according to the viral replicative strategy. Selectable markers for use in mammalian cells include, but are not limited to, resistance to neomycin (G418), blasticidin, hygromycin and zeocin, and selection based upon the purine salvage pathway using HAT medium.

[0195] Expression in mammalian cells can be achieved using a variety of plasmids, including pSV2, pBC12BI, and p91023, as well as lytic virus vectors (e.g. vaccinia virus, adeno virus, and baculovirus), episomal virus vectors (e.g. bovine papillomavirus), and retroviral vectors (e.g., murine retroviruses). Useful vectors for insect cells include baculoviral vectors and pVL 941.

[0196] Plant cells can also be used for expression, with the vector replicon typically derived from a plant virus (e.g., cauliflower mosaic virus, CaMV; tobacco mosaic virus, TMV) and selectable markers chosen for suitability in plants.

[0197] It is known that codon usage of different host cells may be different. For example, a plant cell and a human cell may exhibit a difference in codon preference for encoding a particular amino acid. As a result, human mRNA may not be efficiently translated in a plant, bacteria or insect host cell. Therefore, another embodiment of this invention is directed to codon optimization. The codons of the nucleic acid molecules of the invention may be modified to resemble, as much as possible, genes naturally contained within the host cell without altering the amino acid sequence encoded by the nucleic acid molecule.

[0198] Any of a wide variety of expression control sequences may be used in these vectors to express the nucleic acid molecules of this invention. Such useful expression control sequences include the expression control sequences associated with structural genes of the foregoing expression vectors. Expression control sequences that control transcription include, e.g., promoters, enhancers and transcription termination sites. Expression control sequences in eukaryotic cells that control post-transcriptional events include splice donor and acceptor sites and sequences that modify the half-life of the transcribed RNA, e.g., sequences that direct poly(A) addition or binding sites for RNA-binding proteins. Expression control sequences that control translation include ribosome binding sites, sequences which direct targeted expression of the polypeptide to or within particular cellular compartments, and sequences in the 5′ and 3′ untranslated regions that modify the rate or efficiency of translation.

[0199] Examples of useful expression control sequences for a prokaryote, e.g. E. coli, will include a promoter, often a phage promoter, such as phage lambda pL promoter, the trc promoter, a hybrid derived from the trp and lac promoters, the bacteriophage T7 promoter (in E. coli cells engineered to express the T7 polymerase), the TAC or TRC system, the major operator and promoter regions of phage lambda, the control regions of fd coat protein, and the araBAD operon. Prokaryotic expression vectors may further include transcription terminators, such as the aspA terminator, and elements that facilitate translation, such as a consensus ribosome binding site and translation termination codon, Schomer et al., Proc. Natl. Acad. Sci. USA 83: 8506-8510 (1986).

[0200] Expression control sequences for yeast cells, typically S. cerevisiae, will include a yeast promoter, such as the CYC1 promoter, the GAL1 promoter, the GAL10 promoter, ADH1 promoter, the promoters of the yeast α-mating system, or the GPD promoter, and will typically have elements that facilitate transcription termination, such as the transcription termination signals from the CYC1 or ADH1 gene.

[0201] Expression vectors useful for expressing proteins in mammalian cells will include a promoter active in mammalian cells. These promoters include, but are not limited to, those derived from mammalian viruses, such as the enhancer-promoter sequences from the immediate early gene of the human cytomegalovirus (CMV), the enhancer-promoter sequences from the Rous sarcoma virus long terminal repeat (RSV LTR), the enhancer-promoter from SV40 and the early and late promoters of adenovirus. Other expression control sequences include the promoter for 3-phosphoglycerate kinase or other glycolytic enzymes, the promoters of acid phosphatase. Other expression control sequences include those from the gene comprising the CSNA of interest. Often, expression is enhanced by incorporation of polyadenylation sites, such as the late SV40 polyadenylation site and the polyadenylation signal and transcription termination sequences from the bovine growth hormone (BGH) gene, and ribosome binding sites. Furthermore, vectors can include introns, such as intron II of rabbit β-globin gene and the SV40 splice elements.

[0202] Preferred nucleic acid vectors also include a selectable or amplifiable marker gene and means for amplifying the copy number of the gene of interest. Such marker genes are well known in the art. Nucleic acid vectors may also comprise stabilizing sequences (e.g., ori- or ARS-like sequences and telomere-like sequences), or may alternatively be designed to favor directed or non-directed integration into the host cell genome. In a preferred embodiment, nucleic acid sequences of this invention are inserted in frame into an expression vector that allows a high level expression of an RNA which encodes a protein comprising the encoded nucleic acid sequence of interest. Nucleic acid cloning and sequencing methods are well known to those of skill in the art and are described in an assortment of laboratory manuals, including Sambrook (1989), supra, Sambrook (2000), supra; Ausubel (1992), supra; and Ausubel (1999), supra. Product information from manufacturers of biological, chemical and immunological reagents also provide useful information.

[0203] Expression vectors may be either constitutive or inducible. Inducible vectors include either naturally inducible promoters, such as the trc promoter, which is regulated by the lac operon, and the pL promoter, which is regulated by tryptophan, the MMTV-LTR promoter, which is inducible by dexamethasone, or can contain synthetic promoters and/or additional elements that confer inducible control on adjacent promoters. Examples of inducible synthetic promoters are the hybrid Plac/ara-1 promoter and the PLtetO-1 promoter. The PLtetO-1 promoter takes advantage of the high expression levels from the PL promoter of phage lambda, but replaces the lambda repressor sites with two copies of operator 2 of the Tn10 tetracycline resistance operon, causing this promoter to be tightly repressed by the Tet repressor protein and induced in response to tetracycline (Tc) and Tc derivatives such as anhydrotetracycline. Vectors may also be inducible because they contain hormone response elements, such as the glucocorticoid response element (GRE) and the estrogen response element (ERE), which can confer hormone inducibility where vectors are used for expression in cells having the respective hormone receptors. To reduce background levels of expression, elements responsive to ecdysone, an insect hormone, can be used instead, with coexpression of the ecdysone receptor.

[0204] In one embodiment of the invention, expression vectors can be designed to fuse the expressed polypeptide to small protein tags that facilitate purification and/or visualization. Such tags include a polyhistidine tag that facilitates purification of the fusion protein by immobilized metal affinity chromatography, for example using NiNTA resin (Qiagen Inc., Valencia, Calif., USA) or TALON™ resin (cobalt immobilized affinity chromatography medium, Clontech Labs, Palo Alto, Calif., USA). The fusion protein can include a chitin-binding tag and self-excising intein, permitting chitin-based purification with self-removal of the fused tag (IMPACT™ system, New England Biolabs, Inc., Beverley, Mass., USA). Alternatively, the fusion protein can include a calmodulin-binding peptide tag, permitting purification by calmodulin affinity resin (Stratagene, La Jolla, Calif., USA), or a specifically excisable fragment of the biotin carboxylase carrier protein, permitting purification of in vivo biotinylated protein using an avidin resin and subsequent tag removal (Promega, Madison, Wiss., USA). As another useful alternative, the polypeptides of the present invention can be expressed as a fusion to glutathione-S-transferase, the affinity and specificity of binding to glutathione permitting purification using glutathione affinity resins, such as Glutathione-Superflow Resin (Clontech Laboratories, Palo Alto, Calif., USA), with subsequent elution with free glutathione. Other tags include, for example, the Xpress epitope, detectable by anti-Xpress antibody (Invitrogen, Carlsbad, Calif., USA), a myc tag, detectable by anti-myc tag antibody, the V5 epitope, detectable by anti-V5 antibody (Invitrogen, Carlsbad, Calif., USA), FLAG® epitope, detectable by anti-FLAG® antibody (Stratagene, La Jolla, Calif., USA), and the HA epitope, detectable by anti-HA antibody.

[0205] For secretion of expressed polypeptides, vectors can include appropriate sequences that encode secretion signals, such as leader peptides. For example, the pSecTag2 vectors (Invitrogen, Carlsbad, Calif., USA) are 5.2 kb mammalian expression vectors that carry the secretion signal from the V-J2-C region of the mouse Ig kappa-chain for efficient secretion of recombinant proteins from a variety of mammalian cell lines.

[0206] Expression vectors can also be designed to fuse proteins encoded by the heterologous nucleic acid insert to polypeptides that are larger than purification and/or identification tags. Useful protein fusions include those that permit display of the encoded protein on the surface of a phage or cell, fusions to intrinsically fluorescent proteins, such as those that have a green fluorescent protein (GFP)-like chromophore, fusions to the IgG Fc region, and fusions for use in two hybrid systems.

[0207] Vectors for phage display fuse the encoded polypeptide to, e.g., the gene III protein (pIII) or gene VII protein (pVIII) for display on the surface of filamentous phage, such as M13. See Barbas et al., Phage Display: A Laboratory Manual. Cold Spring Harbor Laboratory Press (2001); Kay et al. (eds.), Phage Display of Peptides and Proteins: A Laboratory Manual, Academic Press, Inc., (1996); Abelson et al. (eds.), Combinatorial Chemistry (Methods in Enzymology, Vol. 267) Academic Press (1996). Vectors for yeast display, e.g. the pYD1 yeast display vector (Invitrogen, Carlsbad, Calif., USA), use the α-agglutinin yeast adhesion receptor to display recombinant protein on the surface of S. cerevisiae. Vectors for mammalian display, e.g., the pDisplay™ vector (Invitrogen, Carlsbad, Calif., USA), target recombinant proteins using an N-terminal cell surface targeting signal and a C-terminal transmembrane anchoring domain of platelet derived growth factor receptor.

[0208] A wide variety of vectors now exist that fuse proteins encoded by heterologous nucleic acids to the chromophore of the substrate-independent, intrinsically fluorescent green fluorescent protein from Aequorea Victoria (“GFP”) and its variants. The GFP-like chromophore can be selected from GFP-like chromophores found in naturally occurring proteins, such as A. victoria GFP (GenBank accession number AAA27721), Renilla renifonnis GFP, FP583 (GenBank accession no. AF168419) (DsRed), FP593 (AF272711), FP483 (AF168420), FP484 (AF168424), FP595 (AF246709), FP486 (AF168421), FP538 (AF168423), and FP506 (AF168422), and need include only so much of the native protein as is needed to retain the chromophore's intrinsic fluorescence. Methods for determining the minimal domain required for fluorescence are known in the art. See Li et al., J. Biol. Chem. 272: 28545-28549 (1997). Alternatively, the GFP-like chromophore can be selected from GFP-like chromophores modified from those found in nature. The methods for engineering such modified GFP-like chromophores and testing them for fluorescence activity, both alone and as part of protein fusions, are well known in the art. See Heim et al., Curr. Biol. 6: 178-182 (1996) and Palm et al., Methods Enzymol. 302: 378-394 (1999). A variety of such modified chromophores are now commercially available and can readily be used in the fusion proteins of the present invention. These include EGFP (“enhanced GFP”), EBFP (“enhanced blue fluorescent protein”), BFP2, EYFP (“enhanced yellow fluorescent protein”), ECFP (“enhanced cyan fluorescent protein”) or Citrine. EGFP (see, e.g, Cormack et al., Gene 173: 33-38 (1996); U.S. Pat. Nos. 6,090,919 and 5,804,387, the disclosures of which are incorporated herein by reference in their entireties) is found on a variety of vectors, both plasmid and viral, which are available commercially (Clontech Labs, Palo Alto, Calif., USA); EBFP is optimized for expression in mammalian cells whereas BFP2, which retains the original jellyfish codons, can be expressed in bacteria (see, e.g,. Heim et al., Curr. Biol. 6: 178-182 (1996) and Cormack et al., Gene 173: 33-38 (1996)). Vectors containing these blue-shifted variants are available from Clontech Labs (Palo Alto, Calif., USA). Vectors containing EYFP, ECFP (see, e.g., Heim et al., Curr. Biol. 6: 178-182 (1996); Miyawaki et al., Nature 388: 882-887 (1997)) and Citrine (see, e.g., Heikal et al., Proc. Natl. Acad. Sci. USA 97: 11996-12001 (2000)) are also available from Clontech Labs. The GFP-like chromophore can also be drawn from other modified GFPs, including those described in U.S. Pat. Nos. 6,124,128; 6,096,865; 6,090,919; 6,066,476; 6,054,321; 6,027,881; 5,968,750; 5,874,304; 5,804,387; 5,777,079; 5,741,668; and 5,625,048, the disclosures of which are incorporated herein by reference in their entireties. See also Conn (ed.), Green Fluorescent Protein (Methods in Enzymology, Vol. 302), Academic Press, Inc. (1999); Yang, et al., J Biol Chem, 273: 8212-6 (1998); Bevis et al., Nature Biotechnology, 20:83-7 (2002). The GFP-like chromophore of each of these GFP variants can usefully be included in the fusion proteins of the present invention.

[0209] Fusions to the IgG Fc region increase serum half-life of protein pharmaceutical products through interaction with the FcRn receptor (also denominated the FcRp receptor and the Brambell receptor, FcRb), further described in International Patent Application Nos. WO 97/43316, WO 97/34631, WO 96/32478, and WO 96/18412, the disclosures of which are incorporated herein by reference in their entireties.

[0210] For long-term, high-yield recombinant production of the polypeptides of the present invention, stable expression is preferred. Stable expression is readily achieved by integration into the host cell genome of vectors having selectable markers, followed by selection of these integrants. Vectors such as pUB6/V5-His A, B, and C (Invitrogen, Carlsbad, Calif., USA) are designed for high-level stable expression of heterologous proteins in a wide range of mammalian tissue types and cell lines. pUB6/V5-His uses the promoter/enhancer sequence from the human ubiquitin C gene to drive expression of recombinant proteins: expression levels in 293, CHO, and NIH3T3 cells are comparable to levels from the CMV and human EF-1a promoters. The bsd gene permits rapid selection of stably transfected mammalian cells with the potent antibiotic blasticidin.

[0211] Replication incompetent retroviral vectors, typically derived from Moloney murine leukemia virus, also are useful for creating stable transfectants having integrated provirus. The highly efficient transduction machinery of retroviruses, coupled with the availability of a variety of packaging cell lines such as RetroPack™ PT 67, EcoPack2™-293, AmphoPack-293, and GP2-293 cell lines (all available from Clontech Laboratories, Palo Alto, Calif., USA) allow a wide host range to be infected with high efficiency; varying the multiplicity of infection readily adjusts the copy number of the integrated provirus.

[0212] Of course, not all vectors and expression control sequences will function equally well to express the nucleic acid molecules of this invention. Neither will all hosts function equally well with the same expression system. However, one of skill in the art may make a selection among these vectors, expression control sequences and hosts without undue experimentation and without departing from the scope of this invention. For example, in selecting a vector, the host must be considered because the vector must be replicated in it. The vector's copy number, the ability to control that copy number, the ability to control integration, if any, and the expression of any other proteins encoded by the vector, such as an antibiotic or other selection marker, should also be considered. The present invention further includes host cells comprising the vectors of the present invention, either present episomally within the cell or integrated, in whole or in part, into the host cell chromosome. Among other considerations, some of which are described above, a host cell strain may be chosen for its ability to process the expressed polypeptide in the desired fashion. Such post-translational modifications of the polypeptide include, but are not limited to, acetylation, carboxylation, glycosylation, phosphorylation, lipidation, and acylation, and it is an aspect of the present invention to provide CSPs with such post-translational modifications.

[0213] In selecting an expression control sequence, a variety of factors should also be considered. These include, for example, the relative strength of the sequence, its controllability, and its compatibility with the nucleic acid molecules of this invention, particularly with regard to potential secondary structures. Unicellular hosts should be selected by consideration of their compatibility with the chosen vector, the toxicity of the product coded for by the nucleic acid sequences of this invention, their secretion characteristics, their ability to fold the polypeptide correctly, their fermentation or culture requirements, and the ease of purification from them of the products coded for by the nucleic acid molecules of this invention.

[0214] The recombinant nucleic acid molecules and more particularly, the expression vectors of this invention may be used to express the polypeptides of this invention as recombinant polypeptides in a heterologous host cell. The polypeptides of this invention may be full-length or less than full-length polypeptide fragments recombinantly expressed from the nucleic acid molecules according to this invention. Such polypeptides include analogs, derivatives and muteins that may or may not have biological activity.

[0215] Vectors of the present invention will also often include elements that permit in vitro transcription of RNA from the inserted heterologous nucleic acid. Such vectors typically include a phage promoter, such as that from T7, T3, or SP6, flanking the nucleic acid insert. Often two different such promoters flank the inserted nucleic acid, permitting separate in vitro production of both sense and antisense strands.

[0216] Transformation and other methods of introducing nucleic acids into a host cell (e.g., conjugation, protoplast transformation or fusion, transfection, electroporation, liposome delivery, membrane fusion techniques, high velocity DNA-coated pellets, viral infection and protoplast fusion) can be accomplished by a variety of methods which are well known in the art (See, for instance, Ausubel, supra, and Sambrook et al., supra). Bacterial, yeast, plant or mammalian cells are transformed or transfected with an expression vector, such as a plasmid, a cosmid, or the like, wherein the expression vector comprises the nucleic acid of interest. Alternatively, the cells may be infected by a viral expression vector comprising the nucleic acid of interest. Depending upon the host cell, vector, and method of transformation used, transient or stable expression of the polypeptide will be constitutive or inducible. One having ordinary skill in the art will be able to decide whether to express a polypeptide transiently or stably, and whether to express the protein constitutively or inducibly.

[0217] A wide variety of unicellular host cells are useful in expressing the DNA sequences of this invention. These hosts may include well known eukaryotic and prokaryotic hosts, such as strains of, fungi, yeast, insect cells such as Spodoptera frugiperda (SF9), animal cells such as CHO, as well as plant cells in tissue culture. Representative examples of appropriate host cells include, but are not limited to, bacterial cells, such as E. coli, Caulobacter crescentus, Streptomyces species, and Salmonella typhimurium; yeast cells, such as Saccharomyces cerevisiae, Schizosaccharomyces pombe, Pichia pastoris, Pichia methanolica; insect cell lines, such as those from Spodoptera frugiperda, e.g., Sf9 and Sf21 cell lines, and expresSF™ cells (Protein Sciences Corp., Meriden, Conn., USA), Drosophila S2 cells, and Trichoplusia ni High Five® Cells (Invitrogen, Carlsbad, Calif., USA); and mammalian cells. Typical mammalian cells include BHK cells, BSC 1 cells, BSC 40 cells, BMT 10 cells, VERO cells, COS1 cells, COS7 cells, Chinese hamster ovary (CHO) cells, 3T3 cells, NIH 3T3 cells, 293 cells, HEPG2 cells, HeLa cells, L cells, MDCK cells, HEK293 cells, WI38 cells, murine ES cell lines (e.g., from strains 129/SV, C57/BL6, DBA-1, 129/SVJ), K562 cells, Jurkat cells, and BW5147 cells. Other mammalian cell lines are well known and readily available from the American Type Culture Collection (ATCC) (Manassas, Va., USA) and the National Institute of General Medical Sciences (NIGMS) Human Genetic Cell Repository at the Coriell Cell Repositories (Camden, N.J., USA). Cells or cell lines derived from colon are particularly preferred because they may provide a more native post-translational processing. Particularly preferred are human colon cells.

[0218] Particular details of the transfection, expression and purification of recombinant proteins are well documented and are understood by those of skill in the art. Further details on the various technical aspects of each of the steps used in recombinant production of foreign genes in bacterial cell expression systems can be found in a number of texts and laboratory manuals in the art. See, e.g., Ausubel (1992), supra, Ausubel (1999), supra, Sambrook (1989), supra, and Sambrook (2001), supra.

[0219] Methods for introducing the vectors and nucleic acid molecules of the present invention into the host cells are well known in the art; the choice of technique will depend primarily upon the specific vector to be introduced and the host cell chosen.

[0220] Nucleic acid molecules and vectors may be introduced into prokaryotes, such as E. coli, in a number of ways. For instance, phage lambda vectors will typically be packaged using a packaging extract (e.g., Gigapack® packaging extract, Stratagene, La Jolla, Calif., USA), and the packaged virus used to infect E. coli.

[0221] Plasmid vectors will typically be introduced into chemically competent or electrocompetent bacterial cells. E. coli cells can be rendered chemically competent by treatment, e.g., with CaCl₂, or a solution of Mg²⁺, Mn²⁺, Ca²⁺, Rb⁺ or K⁺, dimethyl sulfoxide, dithiothreitol, and hexamine cobalt (III), Hanahan, J. Mol. Biol. 166(4):557-80 (1983), and vectors introduced by heat shock. A wide variety of chemically competent strains are also available commercially (e.g., Epicurian Coli® XL10-Gold® Ultracompetent Cells (Stratagene, La Jolla, Calif., USA); DH5α competent cells (Clontech Laboratories, Palo Alto, Calif., USA); and TOP10 Chemically Competent E. coli Kit (Invitrogen, Carlsbad, Calif., USA)). Bacterial cells can be rendered electrocompetent to take up exogenous DNA by electroporation by various pre-pulse treatments; vectors are introduced by electroporation followed by subsequent outgrowth in selected media. An extensive series of protocols is provided by BioRad (Richmond, Calif., USA).

[0222] Vectors can be introduced into yeast cells by spheroplasting, treatment with lithium salts, electroporation, or protoplast fusion. Spheroplasts are prepared by the action of hydrolytic enzymes such as a snail-gut extract, usually denoted Glusulase or Zymolyase, or an enzyme from Arthirobacter luteus to remove portions of the cell wall in the presence of osmotic stabilizers, typically 1 M sorbitol. DNA is added to the spheroplasts, and the mixture is co-precipitated with a solution of polyethylene glycol (PEG) and Ca²⁺. Subsequently, the cells are resuspended in a solution of sorbitol, mixed with molten agar and then layered on the surface of a selective plate containing sorbitol.

[0223] For lithium-mediated transformation, yeast cells are treated with lithium acetate to permeabilize the cell wall, DNA is added and the cells are co-precipitated with PEG. The cells are exposed to a brief heat shock, washed free of PEG and lithium acetate, and subsequently spread on plates containing ordinary selective medium. Increased frequencies of transformation are obtained by using specially-prepared single-stranded carrier DNA and certain organic solvents. Schiestl et al., Curr. Genet. 16(5-6): 339-46 (1989).

[0224] For electroporation, freshly-grown yeast cultures are typically washed, suspended in an osmotic protectant, such as sorbitol, mixed with DNA, and the cell suspension pulsed in an electroporation device. Subsequently, the cells are spread on the surface of plates containing selective media. Becker et al., Methods Enzymol 194: 182-187 (1991). The efficiency of transformation by electroporation can be increased over 100-fold by using PEG, single-stranded carrier DNA and cells that are in late log-phase of growth. Larger constructs, such as YACs, can be introduced by protoplast fusion.

[0225] Mammalian and insect cells can be directly infected by packaged viral vectors, or transfected by chemical or electrical means. For chemical transfection, DNA can be coprecipitated with CaPO₄ or introduced using liposomal and nonliposomal lipid-based agents. Commercial kits are available for CaPO₄ transfection (CalPhos™ Mammalian Transfection Kit, Clontech Laboratories, Palo Alto, Calif., USA), and lipid-mediated transfection can be practiced using commercial reagents, such as LIPOFECTAMINE™ 2000, LIPOFECTAMINE™ Reagent, CELLFECTIN® Reagent, and LIPOFECTIN® Reagent (Invitrogen, Carlsbad, Calif., USA), DOTAP Liposomal Transfection Reagent, FuGENE 6, X-tremeGENE Q2, DOSPER, (Roche Molecular Biochemicals, Indianapolis, Ind. USA), Effectene™, PolyFect®, Superfect® (Qiagen, Inc., Valencia, Calif., USA). Protocols for electroporating mammalian cells can be found in, for example, ; Norton et al. (eds.), Gene Transfer Methods: Introducing DNA into Living Cells and Organisms. BioTechniques Books, Eaton Publishing Co. (2000). Other transfection techniques include transfection by particle bombardment and microinjection. See, e.g., Cheng et al., Proc. Natl. Acad. Sci. USA 90(10): 4455-9 (1993); Yang et al., Proc. Natl. Acad. Sci. USA 87(24): 9568-72 (1990).

[0226] Production of the recombinantly produced proteins of the present invention can optionally be followed by purification.

[0227] Purification of recombinantly expressed proteins is now well within the skill in the art and thus need not be detailed here. See, e.g., Thorner et al. (eds.), Applications of Chimeric Genes and Hybrid Proteins. Part A: Gene Expression and Protein Purification (Methods in Enzymology, Vol. 326), Academic Press (2000); Harbin (ed.), Cloning, Gene Expression and Protein Purification: Experimental Procedures and Process Rationale, Oxford Univ. Press (2001); Marshak et al., Strategies for Protein Purification and Characterization: A Laboratory Course Manual, Cold Spring Harbor Laboratory Press (1996); and Roe (ed.), Protein Purification Applications, Oxford University Press (2001).

[0228] Briefly, however, if purification tags have been fused through use of an expression vector that appends such tags, purification can be effected, at least in part, by means appropriate to the tag, such as use of immobilized metal affinity chromatography for polyhistidine tags. Other techniques common in the art include ammonium sulfate fractionation, immunoprecipitation, fast protein liquid chromatography (FPLC), high performance liquid chromatography (HPLC), and preparative gel electrophoresis.

Polypeptides, including Fragments Muteins, Homologous Proteins, Allelic Variants, Analogs and Derivatives

[0229] Another aspect of the invention relates to polypeptides encoded by the nucleic acid molecules described herein. In a preferred embodiment, the polypeptide is a colon specific polypeptide (CSP). In an even more preferred embodiment, the polypeptide comprises an amino acid sequence of SEQ ID NO:95-248 or is derived from a polypeptide having the amino acid sequence of SEQ ID NO: 95-248. A polypeptide as defined herein may be produced recombinantly, as discussed supra, may be isolated from a cell that naturally expresses the protein, or may be chemically synthesized following the teachings of the specification and using methods well known to those having ordinary skill in the art.

[0230] Polypeptides of the present invention may also comprise a part or fragment of a CSP. In a preferred embodiment, the fragment is derived from a polypeptide having an amino acid sequence selected from the group consisting of SEQ ID NO: 95-248. Polypeptides of the present invention comprising a part or fragment of an entire CSP may or may not be CSPs. For example, a full-length polypeptide may be colon-specific, while a fragment thereof may be found in other tissues as well as in colon. A polypeptide that is not a CSP, whether it is a fragment, analog, mutein, homologous protein or derivative, is nevertheless useful, especially for immunizing animals to prepare anti-CSP antibodies. In a preferred embodiment, the part or fragment is a CSP. Methods of determining whether a polypeptide of the present invention is a CSP are described infra.

[0231] Polypeptides of the present invention comprising fragments of at least 6 contiguous amino acids are also useful in mapping B cell and T cell epitopes of the reference protein. See, e.g., Geysen et al., Proc. Natl. Acad. Sci. USA 81: 3998-4002 (1984) and U.S. Pat. Nos. 4,708,871 and 5,595,915, the disclosures of which are incorporated herein by reference in their entireties. Because the fragment need not itself be immunogenic, part of an immunodominant epitope, nor even recognized by native antibody, to be useful in such epitope mapping, all fragments of at least 6 amino acids of a polypeptide of the present invention have utility in such a study.

[0232] Polypeptides of the present invention comprising fragments of at least 8 contiguous amino acids, often at least 15 contiguous amino acids, are useful as immunogens for raising antibodies that recognize polypeptides of the present invention. See, e.g., Lerner, Nature 299: 592-596 (1982); Shinnick et al., Annu. Rev. Microbiol. 37: 425-46 (1983); Sutcliffe et al., Science 219: 660-6 (1983). As further described in the above-cited references, virtually all 8-mers, conjugated to a carrier, such as a protein, prove immunogenic and are capable of eliciting antibody for the conjugated peptide; accordingly, all fragments of at least 8 amino acids of the polypeptides of the present invention have utility as immunogens.

[0233] Polypeptides comprising fragments of at least 8, 9, 10 or 12 contiguous amino acids are also useful as competitive inhibitors of binding of the entire polypeptide, or a portion thereof, to antibodies (as in epitope mapping), and to natural binding partners, such as subunits in a multimeric complex or to receptors or ligands of the subject protein; this competitive inhibition permits identification and separation of molecules that bind specifically to the polypeptide of interest. See U.S. Pat. Nos. 5,539,084 and 5,783,674, incorporated herein by reference in their entireties.

[0234] The polypeptide of the present invention thus preferably is at least 6 amino acids in length, typically at least 8, 9, 10 or 12 amino acids in length, and often at least 15 amino acids in length. Often, the polypeptide of the present invention is at least 20 amino acids in length, even 25 amino acids, 30 amino acids, 35 amino acids, or 50 amino acids or more in length. Of course, larger polypeptides having at least 75 amino acids, 100 amino acids, or even 150 amino acids are also useful, and at times preferred.

[0235] One having ordinary skill in the art can produce fragments by truncating the nucleic acid molecule, e.g., a CSNA, encoding the polypeptide and then expressing it recombinantly. Alternatively, one can produce a fragment by chemically synthesizing a portion of the full-length polypeptide. One may also produce a fragment by enzymatically cleaving either a recombinant polypeptide or an isolated naturally occurring polypeptide. Methods of producing polypeptide fragments are well known in the art. See, e.g., Sambrook (1989), supra, Sambrook (2001), supra; Ausubel (1992), supra; and Ausubel (1999), supra. In one embodiment, a polypeptide comprising only a fragment, preferably a fragment of a CSP, may be produced by chemical or enzymatic cleavage of a CSP polypeptide. In a preferred embodiment, a polypeptide fragment is produced by expressing a nucleic acid molecule of the present invention encoding a fragment, preferably of a CSP, in a host cell.

[0236] Polypeptides of the present invention are also inclusive of mutants, fusion proteins, homologous proteins and allelic variants.

[0237] A mutant protein, or mutein, may have the same or different properties compared to a naturally occurring polypeptide and comprises at least one amino acid insertion, duplication, deletion, rearrangement or substitution compared to the amino acid sequence of a native polypeptide. Small deletions and insertions can often be found that do not alter the function of a protein. Muteins may or may not be colon-specific. Preferably, the mutein is colon-specific. More preferably the mutein is a polypeptide that comprises at least one amino acid insertion, duplication, deletion, rearrangement or substitution compared to the amino acid sequence of SEQ ID NO: 95-248. Accordingly, in a preferred embodiment, the mutein is one that exhibits at least 50% sequence identity, more preferably at least 60% sequence identity, even more preferably at least 70%, yet more preferably at least 80% sequence identity to a CSP comprising an amino acid sequence of SEQ ID NO: 95-248. In a yet more preferred embodiment, the mutein exhibits at least 85%, more preferably 90%, even more preferably 95% or 96%, and yet more preferably at least 97%, 98%, 99% or 99.5% sequence identity to a CSP comprising an amino acid sequence of SEQ ID NO: 95-248.

[0238] A mutein may be produced by isolation from a naturally occurring mutant cell, tissue or organism. A mutein may be produced by isolation from a cell, tissue or organism that has been experimentally mutagenized. Alternatively, a mutein may be produced by chemical manipulation of a polypeptide, such as by altering the amino acid residue to another amino acid residue using synthetic or semi-synthetic chemical techniques. In a preferred embodiment, a mutein is produced from a host cell comprising a mutated nucleic acid molecule compared to the naturally occurring nucleic acid molecule. For instance, one may produce a mutein of a polypeptide by introducing one or more mutations into a nucleic acid molecule of the invention and then expressing it recombinantly. These mutations may be targeted, in which particular encoded amino acids are altered, or may be untargeted, in which random encoded amino acids within the polypeptide are altered. Muteins with random amino acid alterations can be screened for a particular biological activity or property, particularly whether the polypeptide is colon-specific, as described below. Multiple random mutations can be introduced into the gene by methods well known to the art, e.g., by error-prone PCR, shuffling, oligonucleotide-directed mutagenesis, assembly PCR, sexual PCR mutagenesis, in vivo mutagenesis, cassette mutagenesis, recursive ensemble mutagenesis, exponential ensemble mutagenesis and site-specific mutagenesis. Methods of producing muteins with targeted or random amino acid alterations are well known in the art. See, e.g., Sambrook (1989), supra; Sambrook (2001), supra; Ausubel (1992), supra; and Ausubel (1999), as well as U.S. Pat. No. 5,223,408, which is herein incorporated by reference in its entirety.

[0239] The invention also contemplates polypeptides that are homologous to a polypeptide of the invention. In a preferred embodiment, the polypeptide is homologous to a CSP. In an even more preferred embodiment, the polypeptide is homologous to a CSP selected from the group having an amino acid sequence of SEQ ID NO: 95-248. By homologous polypeptide it is meant one that exhibits significant sequence identity to a CSP, preferably a CSP having an amino acid sequence of SEQ ID NO: 95-248. By significant sequence identity it is meant that the homologous polypeptide exhibits at least 50% sequence identity, more preferably at least 60% sequence identity, even more preferably at least 70%, yet more preferably at least 80% sequence identity to a CSP comprising an amino acid sequence of SEQ ID NO: 95-248. More preferred are homologous polypeptides exhibiting at least 85%, more preferably 90%, even more preferably 95% or 96%, and yet more preferably at least 97% or 98% sequence identity to a CSP comprising an amino acid sequence of SEQ ID NO: 95-248. Most preferably, the homologous polypeptide exhibits at least 99%, more preferably 99.5%, even more preferably 99.6%, 99.7%, 99.8% or 99.9% sequence identity to a CSP comprising an amino acid sequence of SEQ ID NO: 95-248. In a preferred embodiment, the amino acid substitutions of the homologous polypeptide are conservative amino acid substitutions as discussed supra.

[0240] Homologous polypeptides of the present invention also comprise polypeptide encoded by a nucleic acid molecule that selectively hybridizes to a CSNA or an antisense sequence thereof. In this embodiment, it is preferred that the homologous polypeptide be encoded by a nucleic acid molecule that hybridizes to a CSNA under low stringency, moderate stringency or high stringency conditions, as defined herein. More preferred is a homologous polypeptide encoded by a nucleic acid sequence which hybridizes to a CSNA selected from the group consisting of SEQ ID NO: 1-94 or a homologous polypeptide encoded by a nucleic acid molecule that hybridizes to a nucleic acid molecule that encodes a CSP, preferably a CSP of SEQ ID NO:95-248 under low stringency, moderate stringency or high stringency conditions, as defined herein.

[0241] Homologous polypeptides of the present invention may be naturally occurring and derived from another species, especially one derived from another primate, such as chimpanzee, gorilla, rhesus macaque, or baboon, wherein the homologous polypeptide comprises an amino acid sequence that exhibits significant sequence identity to that of SEQ ID NO: 95-248. The homologous polypeptide may also be a naturally occurring polypeptide from a human, when the CSP is a member of a family of polypeptides. The homologous polypeptide may also be a naturally occurring polypeptide derived from a non-primate, mammalian species, including without limitation, domesticated species, e.g., dog, cat, mouse, rat, rabbit, guinea pig, hamster, cow, horse, goat or pig. The homologous polypeptide may also be a naturally occurring polypeptide derived from a non-mammalian species, such as birds or reptiles. The naturally occurring homologous protein may be isolated directly from humans or other species. Alternatively, the nucleic acid molecule encoding the naturally occurring homologous polypeptide may be isolated and used to express the homologous polypeptide recombinantly. The homologous polypeptide may also be one that is experimentally produced by random mutation of a nucleic acid molecule and subsequent expression of the nucleic acid molecule. Alternatively, the homologous polypeptide may be one that is experimentally produced by directed mutation of one or more codons to alter the encoded amino acid of a CSP. In a preferred embodiment, the homologous polypeptide encodes a polypeptide that is a CSP.

[0242] Relatedness of proteins can also be characterized using a second functional test, such as the ability of a first protein competitively to inhibit the binding of a second protein to an antibody. It is, therefore, another aspect of the present invention to provide isolated polpeptides not only identical in sequence to those described with particularity herein, but also to provide isolated polypeptides (“cross-reactive proteins”) that competitively inhibit the binding of antibodies to all or to a portion of the isolated polypeptides of the present invention. Such competitive inhibition can readily be determined using immunoassays well known in the art.

[0243] As discussed above, single nucleotide polymorphisms (SNPs) occur frequently in eukaryotic genomes, and the sequence determined from one individual of a species may differ from other allelic forms present within the population. Thus, polypeptides of the present invention are also inclusive of those encoded by an allelic variant of a nucleic acid molecule encoding a CSP. In this embodiment, it is preferred that the polypeptide be encoded by an allelic variant of a gene that encodes a polypeptide having the amino acid sequence selected from the group consisting of SEQ ID NO: 95-248. More preferred is that the polypeptide be encoded by an allelic variant of a gene that has the nucleic acid sequence selected from the group consisting of SEQ ID NO: 1-94.

[0244] Polypeptides of the present invention are also inclusive of derivative polypeptides encoded by a nucleic acid molecule according to the instant invention. In this embodiment, it is preferred that the polypeptide be a CSP. Also preferred are derivative polypeptides having an amino acid sequence selected from the group consisting of SEQ ID NO: 95-248 and which has been acetylated, carboxylated, phosphorylated, glycosylated, ubiquitinated or post-translationally modified in another manner. In another preferred embodiment, the derivative has been labeled with, e.g., radioactive isotopes such as ¹²⁵I, ³²P, ³⁵S, and ³H. In another preferred embodiment, the derivative has been labeled with fluorophores, chemiluminescent agents, enzymes, and antiligands that can serve as specific binding pair members for a labeled ligand.

[0245] Polypeptide modifications are well known to those of skill and have been described in great detail in the scientific literature. Several particularly common modifications, glycosylation, lipid attachment, sulfation, gamma-carboxylation of glutamic acid residues, hydroxylation and ADP-ribosylation, for instance, are described in most basic texts, such as, for instance Creighton, Protein Structure and Molecular Properties, 2nd ed., W. H. Freeman and Company (1993). Many detailed reviews are available on this subject, such as, for example, those provided by Wold, in Johnson (ed.), Posttranslational Covalent Modification of Proteins, pgs. 1-12, Academic Press (1983); Seifter et al., Meth. Enzymol. 182: 626-646 (1990) and Rattan et al., Ann. N.Y. Acad. Sci. 663: 48-62 (1992).

[0246] One may determine whether a polypeptide of the invention is likely to be post-translationally modified by analyzing the sequence of the polypeptide to determine if there are peptide motifs indicative of sites for post-translational modification. There are a number of computer programs that permit prediction of post-translational modifications. See, e.g., expasy.org (accessed Nov. 11, 2002) on the world wide web, which includes PSORT, for prediction of protein sorting signals and localization sites, SignalP, for prediction of signal peptide cleavage sites, MITOPROT and Predotar, for prediction of mitochondrial targeting sequences, NetOGlyc, for prediction of type O-glycosylation sites in mammalian proteins, big-PI Predictor and DGPI, for prediction of prenylation-anchor and cleavage sites, and NetPhos, for prediction of Ser, Thr and Tyr phosphorylation sites in eukaryotic proteins. Other computer programs, such as those included in GCG, also may be used to determine post-translational modification peptide motifs.

[0247] General examples of types of post-translational modifications include, but are not limited to: (Z)-dehydrobutyrine; 1-chondroitin sulfate-L-aspartic acid ester; 1′-glycosyl-L-tryptophan; 1′-phospho-L-histidine; 1-thioglycine; 2′-(S-L-cysteinyl)-L-histidine; 2′-[3-carboxamido (trimethylammonio)propyl]-L-histidine; 2′-alpha-mannosyl-L-tryptophan; 2-methyl-L-glutamine; 2-oxobutanoic acid; 2-pyrrolidone carboxylic acid; 3′-(1′-L-histidyl)-L-tyrosine; 3′-(8alpha-FAD)-L-histidine; 3′-(S-L-cysteinyl)-L-tyrosine; 3′,3″,5′-triiodo-L-thyronine; 3′-4′-phospho-L-tyrosine; 3-hydroxy-L-proline; 3′-methyl-L-histidine; 3-methyl-L-lanthionine; 3′-phospho-L-histidine; 4′-(L-tryptophan)-L-tryptophyl quinone; 42 N-cysteinyl-glycosylphosphatidylinositolethanolamine; 43-(T-L-histidyl)-L-tyrosine; 4-hydroxy-L-arginine; 4-hydroxy-L-lysine; 4-hydroxy-L-proline; 5′-(N6-L-lysine)-L-topaquinone; 5-hydroxy-L-lysine; 5-methyl-L-arginine; alpha-1-microglobulin-Ig alpha complex chromophore; bis-L-cysteinyl bis-L-histidino diiron disulfide; bis-L-cysteinyl-L-N3′-histidino-L-serinyI tetrairon'tetrasulfide; chondroitin sulfate D-glucuronyl-D-galactosyl-D-galactosyl-D-xylosyl-L-serine; D-alanine; D-allo-isoleucine; D-asparagine; dehydroalanine; dehydrotyrosine; dermatan 4-sulfate D-glucuronyl-D-galactosyl-D-galactosyl-D-xylosyl-L-serine; D-glucuronyl-N-glycine; dipyrrolylmethanemethyl-L-cysteine; D-leucine; D-methionine; D-phenylalanine; D-serine; D-tryptophan; glycine amide; glycine oxazolecarboxylic acid; glycine thiazolecarboxylic acid; heme P450-bis-L-cysteine-L-tyrosine; heme-bis-L-cysteine; hemediol-L-aspartyl ester-L-glutamyl ester; hemediol-L-aspartyl ester-L-glutamyl ester-L-methionine sulfonium; heme-L-cysteine; heme-L-histidine; heparan sulfate D-glucuronyl-D-galactosyl-D-galactosyl-D-xylosyl-L-serine; heme P450-bis-L-cysteine-L-lysine; hexakis-L-cysteinyl hexairon hexasulfide; keratan sulfate D-glucuronyl-D-galactosyl-D-galactosyl-D-xylosyl-L-threonine; L oxoalanine-lactic acid; L phenyllactic acid; 1′-(8alpha-FAD)-L-histidine; L-2′,4′,5′-topaquinone; L-3′,4′-dihydroxyphenylalanine; L-3′.4′.5′-trihydroxyphenylalanine; L4′-bromophenylalanine; L-6′-bromotryptophan; L-alanine amide; L-alanyl imidazolinone glycine; L-allysine; L-arginine amide; L-asparagine amide; L-aspartic 4-phosphoric anhydride; L-aspartic acid 1-amide; L-beta-methylthioaspartic acid; L-bromohistidine; L-citrulline; L-cysteine amide; L-cysteine glutathione disulfide; L-cysteine methyl disulfide; L-cysteine methyl ester; L-cysteine oxazolecarboxylic acid; L-cysteine oxazolinecarboxylic acid; L-cysteine persulfide; L-cysteine sulfenic acid; L-cysteine sulfinic acid; L-cysteine thiazolecarboxylic acid; L-cysteinyl homocitryl molybdenum-heptairon-nonasulfide; L-cysteinyl imidazolinone glycine; L-cysteinyl molybdopterin; L-cysteinyl molybdopterin guanine dinucleotide; L-cystine; L-erythro-beta-hydroxyasparagine; L-erythro-beta-hydroxyaspartic acid; L-gamma-carboxyglutamic acid; L-glutamic acid 1-amide; L-glutamic acid 5-methyl ester; L-glutamine amide; L-glutamyl 5-glycerylphosphorylethanolarnine; L-histidine amide; L-isoglutamyl-polyglutamic acid; L-isoglutamyl-polyglycine; L-isoleucine amide; L-lanthionine; L-leucine amide; L-lysine amide; L-lysine thiazolecarboxylic acid; L-lysinoalanine; L-methionine amide; L-methionine sulfone; L-phenyalanine thiazolecarboxylic acid; L-phenylalanine amide; L-proline amide; L-selenocysteine; L-selenocysteinyl molybdopterin guanine dinucleotide; L-serine amide; L-serine thiazolecarboxylic acid; L-seryl imidazolinone glycine; L-T-bromophenylalanine; L-T-bromophenylalanine; L-threonine amide; L-thyroxine; L-tryptophan amide; L-tryptophyl quinone; L-tyrosine amide; L-valine amide; mesolanthionine; N-(L-glutamyl)-L-tyrosine; N-(L-isoaspartyl)-glycine; N-(L-isoaspartyl)-L-cysteine; N,N,N-trimethyl-L-alanine; N,N-dimethyl-L-proline; N2-acetyl-L-lysine; N2-succinyl-L-tryptophan; N4-(ADP-ribosyl)-L-asparagine; N4-glycosyl-L-asparagine; N4-hydroxymethyl-L-asparagine; N4-methyl-L-asparagine; N5-methyl-L-glutamine; N6-1-carboxyethyl-L-lysine; N6-(4-amino hydroxybutyl)-L-lysine; N6-(L-isoglutamyl)-L-lysine; N6-(phospho-5′-adenosine)-L-lysine; N6-(phospho-5′-guanosine)-L-tysine; N6,N6,N6-trimethyl-L-lysine; N6,N6-dimethyl-L-lysine; N6-acetyl-L-lysine; N6-biotinyl-L-lysine; N6-carboxy-L-lysine; N6-formyl-L-lysine; N6-glycyl-L-lysine; N6-lipoyl-L-lysine; N6-methyl-L-lysine; N6-methyl-N6-poly(N-methyl-propylamine)-L-lysine; N6-mureinyl-L-lysine; N6-myristoyl-L-lysine; N6-palmitoyl-L-lysine; N6-pyridoxal phosphate-L-lysine; N6-pyruvic acid 2-iminyl-L-lysine; N6-retinal-L-lysine; N-acetylglycine; N-acetyl-L-glutamine; N-acetyl-L-alanine; N-acetyl-L-aspartic acid; N-acetyl-L-cysteine; N-acetyl-L-glutamic acid; N-acetyl-L-isoleucine; N-acetyl-L-methionine; N-acetyl-L-proline; N-acetyl-L-serine; N-acetyl-L-threonine; N-acetyl-L-tyrosine; N-acetyl-L-valine; N-alanyl-glycosylphosphatidylinositolethanolamine; N-asparaginyl-glycosylphosphatidylinositolethanolarnine; N-aspartyl-glycosylphosphatidylinositolethanolamine; N-formylglycine; N-formyl-L-methionine; N-glycyl-glycosylphosphatidylinositolethanolamine; N-L-glutamyl-poly-L-glutamic acid; N-methylglycine; N-methyl-L-alanine; N-methyl-L-methionine; N-methyl-L-phenylalanine; N-myristoyl-glycine; N-palmitoyl-L-cysteine; N-pyruvic acid 2-iminyl-L-cysteine; N-pyruvic acid 2-iminyl-L-valine; N-seryl-glycosylphosphatidylinositolethanolamine; N-seryl-glycosyCSPhingolipidinositolethanolamine; O-(ADP-ribosyl)-L-serine; O-(phospho-5′-adenosine)-L-threonine; O-(phospho-5′-DNA)-L-serine; O-(phospho-5′-DNA)-L-threonine; O-(phospho-5′rRNA)-L-serine; O-(phosphoribosyl dephospho-coenzyme A)-L-serine; O-(sn-1-glycerophosphoryl)-L-serine; O4′-(8alpha-FAD)-L-tyrosine; O4′-(phospho-5′-adenosine)-L-tyrosine; O4′-(phospho-5′-DNA)-L-tyrosine; O4′-(phospho-5′-RNA)-L-tyrosine; O4′-(phospho-5′-uridine)-L-tyrosine; O4-glycosyl-L-hydroxyproline; O4′-glycosyl-L-tyrosine; O4′-sulfo-L-tyrosine; O5-glycosyl-L-hydroxylysine; O-glycosyl-L-serine; O-glycosyl-L-threonine; omega-N-(ADP-ribosyl)-L-arginine; omega-N-omega-N′-dimethyl-L-arginine; omega-N-methyl-L-arginine; omega-N-omega-N-dimethyl-L-arginine; omega-N-phospho-L-arginine; O′octanoyl-L-serine; O-palmitoyl-L-serine; O-palmitoyl-L-threonine; O-phospho-L-serine; O-phospho-L-threonine; O-phosphopantetheine-L-serine; phycoerythrobilin-bis-L-cysteine; phycourobilin-bis-L-cysteine; pyrroloquinoline quinone; pyruvic acid; S hydroxycinnamyl-L-cysteine; S-(2-aminovinyl) methyl-D-eysteine; S-(2-aminovinyl)-D-cysteine; S-(6-FW-L-cysteine; S-(8alpha-FAD)-L-cysteine; S-(ADP-ribosyl)-L-cysteine; S-(L-isoglutamyl)-L-cysteine; S-12-hydroxyfarnesyl-L-cysteine; S-acetyl-L-cysteine; S-diacylglycerol-L-cysteine; S-diphytanylglycerot diether-L-cysteine; S-farnesyl-L-cysteine; S-geranylgeranyl-L-cysteine; S-glycosyl-L-cysteine; S-glycyl-L-cysteine; S-methyl-L-cysteine; S-nitrosyl-L-cysteine; S-palmitoyl-L-cysteine; S-phospho-L-cysteine; S-phycobiliviolin-L-cysteine; S-phycocyanobilin-L-cysteine; S-phycoerythrobilin-L-cysteine; S-phytochromobilin-L-cysteine; S-selenyl-L-cysteine; S-sulfo-L-cysteine; tetrakis-L-cysteinyl diiron disulfide; tetrakis-L-cysteinyl iron; tetrakis-L-cysteinyl tetrairon tetrasulfide; trans-2,3-cis 4-dihydroxy-L-proline; tris-L-cysteinyl triiron tetrasulfide; tris-L-cysteinyl triiron trisulfide; tris-L-cysteinyl-L-aspartato tetrairon tetrasulfide; tris-L-cysteinyl-L-cysteine persulfido-bis-L-glutamato-L-histidino tetrairon disulfide trioxide; tris-L-cysteinyl-L-N3′-histidino tetrairon tetrasulfide; tris-L-cysteinyl-L-N1′-histidino tetrairon tetrasulfide; and tris-L-cysteinyl-L-serinyl tetrairon tetrasulfide.

[0248] Additional examples of PTMs may be found in web sites such as the Delta Mass database based on Krishna, R. G. and F. Wold (1998). Posttranslational Modifications. Proteins—Analysis and Design. R. H. Angeletti. San Diego, Academic Press. 1: 121-206; Methods in Enzymology, 193, J. A. McClosky (ed) (1990), pages 647-660; Methods in Protein Sequence Analysis edited by Kazutomo Imahori and Fumio Sakiyama, Plenum Press, (1993) “Post-translational modifications of proteins” R. G. Krishna and F. Wold pages 167-172; “GlycoSuiteDB: a new curated relational database of glycoprotein glycan structures and their biological sources” Cooper et al. Nucleic Acids Res. 29; 332-335 (2001) “O-GLYCBASE version 4.0: a revised database of O-glycosylated proteins” Gupta et al. Nucleic Acids Research, 27: 370-372 (1999); and “PhosphoBase, a database of phosphorylation sites: release 2.0.”, Kreegipuu et al. Nucleic Acids Res 27(1):237-239 (1999) see also, WO 02/21139A2, the disclosure of which is incorporated herein by reference in its entirety.

[0249] Tumorigenesis is often accompanied by alterations in the post-translational modifications of proteins. Thus, in another embodiment, the invention provides polypeptides from cancerous cells or tissues that have altered post-translational modifications compared to the post-translational modifications of polypeptides from normal cells or tissues. A number of altered post-translational modifications are known. One common alteration is a change in phosphorylation state, wherein the polypeptide from the cancerous cell or tissue is hyperphosphorylated or hypophosphorylated compared to the polypeptide from a normal tissue, or wherein the polypeptide is phosphorylated on different residues than the polypeptide from a normal cell. Another common alteration is a change in glycosylation state, wherein the polypeptide from the cancerous cell or tissue has more or less glycosylation than the polypeptide from a normal tissue, and/or wherein the polypeptide from the cancerous cell or tissue has a different type of glycosylation than the polypeptide from a noncancerous cell or tissue. Changes in glycosylation may be critical because carbohydrate-protein and carbohydrate-carbohydrate interactions are important in cancer cell progression, dissemination and invasion. See, e.g., Barchi, Curr. Pharm. Des. 6: 485-501 (2000), Verma, Cancer Biochem. Biophys. 14: 151-162 (1994) and Dennis et al., Bioessays 5: 412421 (1999).

[0250] Another post-translational modification that may be altered in cancer cells is prenylation. Prenylation is the covalent attachment of a hydrophobic prenyl group (either farnesyl or geranylgeranyl) to a polypeptide. Prenylation is required for localizing a protein to a cell membrane and is often required for polypeptide function. For instance, the Ras superfamily of GTPase signalling proteins must be prenylated for function in a cell. See, e.g., Prendergast et al., Semin. Cancer Biol. 10: 443-452 (2000) and Khwaja et al., Lancet 355: 741-744 (2000).

[0251] Other post-translation modifications that may be altered in cancer cells include, without limitation, polypeptide methylation, acetylation, arginylation or racemization of amino acid residues. In these cases, the polypeptide from the cancerous cell may exhibit either increased or decreased amounts of the post-translational modification compared to the corresponding polypeptides from noncancerous cells.

[0252] Other polypeptide alterations in cancer cells include abnormal polypeptide cleavage of proteins and aberrant protein-protein interactions. Abnormal polypeptide cleavage may be cleavage of a polypeptide in a cancerous cell that does not usually occur in a normal cell, or a lack of cleavage in a cancerous cell, wherein the polypeptide is cleaved in a normal cell. Aberrant protein-protein interactions may be either covalent cross-linking or non-covalent binding between proteins that do not normally bind to each other. Alternatively, in a cancerous cell, a protein may fail to bind to another protein to which it is bound in a noncancerous cell. Alterations in cleavage or in protein-protein interactions may be due to over- or underproduction of a polypeptide in a cancerous cell compared to that in a normal cell, or may be due to alterations in post-translational modifications (see above) of one or more proteins in the cancerous cell. See, e.g., Henschen-Edman, Ann. N.Y. Acad. Sci. 936: 580-593 (2001).

[0253] Alterations in polypeptide post-translational modifications, as well as changes in polypeptide cleavage and protein-protein interactions, may be determined by any method known in the art. For instance, alterations in phosphorylation may be determined by using anti-phosphoserine, anti-phosphothreonine or anti-phosphotyrosine antibodies or by amino acid analysis. Glycosylation alterations may be determined using antibodies specific for different sugar residues, by carbohydrate sequencing, or by alterations in the size of the glycoprotein, which can be determined by, e.g., SDS polyacrylamide gel electrophoresis (PAGE). Other alterations of post-translational modifications, such as prenylation, racemization, methylation, acetylation and arginylation, may be determined by chemical analysis, protein sequencing, amino acid analysis, or by using antibodies specific for the particular post-translational modifications. Changes in protein-protein interactions and in polypeptide cleavage may be analyzed by any method known in the art including, without limitation, non-denaturing PAGE (for non-covalent protein-protein interactions), SDS PAGE (for covalent protein-protein interactions and protein cleavage), chemical cleavage, protein sequencing or immunoassays.

[0254] In another embodiment, the invention provides polypeptides that have been post-translationally modified. In one embodiment, polypeptides may be modified enzymatically or chemically, by addition or removal of a post-translational modification. For example, a polypeptide may be glycosylated or deglycosylated enzymatically. Similarly, polypeptides may be phosphorylated using a purified kinase, such as a MAP kinase (e.g, p38, ERK, or JNK) or a tyrosine kinase (e.g., Src or erbB2). A polypeptide may also be modified through synthetic chemistry. Alternatively, one may isolate the polypeptide of interest from a cell or tissue that expresses the polypeptide with the desired post-translational modification. In another embodiment, a nucleic acid molecule encoding the polypeptide of interest is introduced into a host cell that is capable of post-translationally modifying the encoded polypeptide in the desired fashion. If the polypeptide does not contain a motif for a desired post-translational modification, one may alter the post-translational modification by mutating the nucleic acid sequence of a nucleic acid molecule encoding the polypeptide so that it contains a site for the desired post-translational modification. Amino acid sequences that may be post-translationally modified are known in the art. See, e.g., the programs described above on the website expasy.org of the world wide web. The nucleic acid molecule may also be introduced into a host cell that is capable of post-translationally modifying the encoded polypeptide. Similarly, one may delete sites that are post-translationally modified by either mutating the nucleic acid sequence so that the encoded polypeptide does not contain the post-translational modification motif, or by introducing the native nucleic acid molecule into a host cell that is not capable of post-translationally modifying the encoded polypeptide.

[0255] It will be appreciated, as is well known and as noted above, that polypeptides are not always entirely linear. For instance, polypeptides may be branched as a result of ubiquitination, and they may be circular, with or without branching, generally as a result of posttranslation events, including natural processing events and events brought about by human manipulation which do not occur naturally. Circular, branched and branched circular polypeptides may be synthesized by non-translation natural processes and by entirely synthetic methods, as well. Modifications can occur anywhere in a polypeptide, including the peptide backbone, the amino acid side-chains and the amino or carboxyl termini. In fact, blockage of the amino or carboxyl group in a polypeptide, or both, by a covalent modification, is common in naturally occurring and synthetic polypeptides and such modifications may be present in polypeptides of the present invention, as well. For instance, the amino terminal residue of polypeptides made in E. coli, prior to proteolytic processing, almost invariably will be N-formylmethionine.

[0256] Useful post-synthetic (and post-translational) modifications include conjugation to detectable labels, such as fluorophores. A wide variety of amine-reactive and thiol-reactive fluorophore derivatives have been synthesized that react under nondenaturing conditions with N-terminal amino groups and epsilon amino groups of lysine residues, on the one hand, and with free thiol groups of cysteine residues, on the other.

[0257] Kits are available commercially that permit conjugation of proteins to a variety of amine-reactive or thiol-reactive fluorophores: Molecular Probes, Inc. (Eugene, Oreg., USA), e.g., offers kits for conjugating proteins to Alexa Fluor 350, Alexa Fluor 430, Fluorescein-EX, Alexa Fluor 488, Oregon Green 488, Alexa Fluor 532, Alexa Fluor 546, Alexa Fluor 546, Alexa Fluor 568, Alexa Fluor 594, and Texas Red-X.

[0258] A wide variety of other amine-reactive and thiol-reactive fluorophores are available commercially (Molecular Probes, Inc., Eugene, Oreg., USA), including Alexa Fluor® 350, Alexa Fluor® 488, Alexa Fluor® 532, Alexa Fluor® 546, Alexa Fluor® 568, Alexa Fluor® 594, Alexa Fluor® 647 (monoclonal antibody labeling kits available from Molecular Probes, Inc., Eugene, Oreg., USA), BODIPY dyes, such as BODIPY 493/503, BODIPY FL, BODIPY R6G, BODIPY 530/550, BODIPY TMR, BODIPY 558/568, BODIPY 558/568, BODIPY 564/570, BODIPY 576/589, BODIPY 581/591, BODIPY TR, BODIPY 630/650, BODIPY 650/665, Cascade Blue, Cascade Yellow, Dansyl, lissamine rhodamine B, Marina Blue, Oregon Green 488, Oregon Green 514, Pacific Blue, rhodamine 6G, rhodamine green, rhodamine red, tetramethylrhodamine, Texas Red (available from Molecular Probes, Inc., Eugene, Oreg., USA).

[0259] The polypeptides of the present invention can also be conjugated to fluorophores, other proteins, and other macromolecules, using bifunctional linking reagents. Common homobifunctional reagents include, e.g., APG, AEDP, BASED, BMB, BMDB, BMH, BMOE, BM[PEO]3, BM[PEO]4, BS3, BSOCOES, DFDNB, DMA, DMP, DMS, DPDPB, DSG, DSP (Lomant's Reagent), DSS, DST, DTBP, DTME, DTSSP, EGS, HBVS, Sulfo-BSOCOES, Sulfo-DST, Sulfo-EGS (all available from Pierce, Rockford, Ill., USA); common heterobifunctional cross-linkers include ABH, AMAS, ANB-NOS, APDP, ASBA, BMPA, BMPH, BMPS, EDC, EMCA, EMCH, EMCS, KMUA, KMUH, GMBS, LC-SMCC, LC-SPDP, MBS, M2C2H, MPBH, MSA, NHS-ASA, PDPH, PMPI, SADP, SAED, SAND, SANPAH, SASD, SATP, SBAP, SFAD, SIA, SIAB, SMCC, SMPB, SMPH, SMPT, SPDP, Sulfo-EMCS, Sulfo-GMBS, Sulfo-HSAB, Sulfo-KMUS, Sulfo-LC-SPDP, Sulfo-MBS, Sulfo-NHS-LC-ASA, Sulfo-SADP, Sulfo-SANPAH, Sulfo-SIAB, Sulfo-SMCC, Sulfo-SMPB, Sulfo-LC-SMPT, SVSB, TFCS (all available Pierce, Rockford, Ill., USA).

[0260] Polypeptides of the present invention, including full length polypeptides, fragments and fusion proteins, can be conjugated, using such cross-linking reagents, to fluorophores that are not amine- or thiol-reactive. Other labels that usefully can be conjugated to polypeptides of the present invention include radioactive labels, echosonographic contrast reagents, and MRI contrast agents.

[0261] Polypeptides of the present invention, including full length polypeptides, fragments and fusion proteins, can also usefully be conjugated using cross-linking agents to carrier proteins, such as KLH, bovine thyroglobulin, and even bovine serum albumin (BSA), to increase immunogenicity for raising anti-CSP antibodies.

[0262] Polypeptides of the present invention, including full length polypeptides, fragments and fusion proteins, can also usefully be conjugated to polyethylene glycol (PEG); PEGylation increases the serum half life of proteins administered intravenously for replacement therapy. Delgado et al., Crit. Rev. Ther. Drug Carrier Syst. 9(3-4): 249-304 (1992); Scott et al., Curr. Pharm. Des. 4(6): 423-38 (1998); DeSantis et al., Curr. Opin. Biotechnol. 10(4): 324-30 (1999). PEG monomers can be attached to the protein directly or through a linker, with PEGylation using PEG monomers activated with tresyl chloride (2,2,2-trifluoroethanesulphonyl chloride) permitting direct attachment under mild conditions.

[0263] Polypeptides of the present invention are also inclusive of analogs of a polypeptide encoded by a nucleic acid molecule according to the instant invention. In a preferred embodiment, this polypeptide is a CSP. In a more preferred embodiment, this polypeptide is derived from a polypeptide having part or all of the amino acid sequence of SEQ ID NO: 95-248. Also preferred is an analog polypeptide comprising one or more substitutions of non-natural amino acids or non-native inter-residue bonds compared to the naturally occurring polypeptide. In one embodiment, the analog is structurally similar to a CSP, but one or more peptide linkages is replaced by a linkage selected from the group consisting of —CH₂NH—, —CH₂S—, —CH₂—CH₂—, —CH═CH—(cis and trans), —COCH₂—, —CH(OH)CH₂ — and —CH₂SO—. In another embodiment, the analog comprises substitution of one or more amino acids of a CSP with a D-amino acid of the same type or other non-natural amino acid in order to generate more stable peptides. D-amino acids can readily be incorporated during chemical peptide synthesis: peptides assembled from D-amino acids are more resistant to proteolytic attack; incorporation of D-amino acids can also be used to confer specific three-dimensional conformations on the peptide. Other amino acid analogues commonly added during chemical synthesis include ornithine, norleucine, phosphorylated amino acids (typically phosphoserine, phosphothreonine, phosphotyrosine), L-malonyltyrosine, a non-hydrolyzable analog of phosphotyrosine (see, e.g., Kole et al., Biochem. Biophys. Res. Com. 209: 817-821 (1995)), and various halogenated phenylalanine derivatives.

[0264] Non-natural amino acids can be incorporated during solid phase chemical synthesis or by recombinant techniques, although the former is typically more common. Solid phase chemical synthesis of peptides is well established in the art Procedures are described, inter alia, in Chan et al. (eds.), Fmoc Solid Phase Peptide Synthesis: A Practical Approach (Practical Approach Series), Oxford Univ. Press (March 2000); Jones, Amino Acid and Peptide Synthesis (Oxford Chemistry Primers, No 7), Oxford Univ. Press (1992); and Bodanszky, Principles of Peptide Synthesis (Springer Laboratory), Springer Verlag (1993).

[0265] Amino acid analogues having detectable labels are also usefully incorporated during synthesis to provide derivatives and analogs. Biotin, for example can be added using biotinoyl-(9-fluorenylmethoxycarbonyl)-L-lysine (FMOC biocytin) (Molecular Probes, Eugene, Oreg., USA). Biotin can also be added enzymatically by incorporation into a fusion protein of an E. coli BirA substrate peptide. The FMOC and tBOC derivatives of dabcyl-L-lysine (Molecular Probes, Inc., Eugene, Oreg., USA) can be used to incorporate the dabcyl chromophore at selected sites in the peptide sequence during synthesis. The aminonaphthalene derivative EDANS, the most common fluorophore for pairing with the dabcyl quencher in fluorescence resonance energy transfer (FRET) systems, can be introduced during automated synthesis of peptides by using EDANS-FMOC-L-glutamic acid or the corresponding tBOC derivative (both from Molecular Probes, Inc., Eugene, Oreg., USA). Tetramethylrhodamine fluorophores can be incorporated during automated FMOC synthesis of peptides using (MOC)-TMR-L-lysine (Molecular Probes, Inc. Eugene, Oreg., USA).

[0266] Other useful amino acid analogues that can be incorporated during chemical synthesis include aspartic acid, glutamic acid, lysine, and tyrosine analogues having allyl side-chain protection (Applied Biosystems, Inc., Foster City, Calif., USA); the allyl side chain permits synthesis of cyclic, branched-chain, sulfonated, glycosylated, and phosphorylated peptides.

[0267] A large number of other FMOC-protected non-natural amino acid analogues capable of incorporation during chemical synthesis are available commercially, including, e.g., Fmoc-2-aminobicyclo[2.2.1]heptane-2-carboxylic acid, Fmoc-3-endo-aminobicyclo[2.2.1]heptane-2-endo-carboxylic acid, Fmoc-3-exo-aminobicyclo[2.2.1]heptane-2-exo-carboxylic acid, Fmoc-3-endo-amino-bicyclo[2.2.1]hept-5-ene-2-endo-carboxylic acid, Fmoc-3-exo-amino-bicyclo[2.2.1]hept-5-ene-2-exo-carboxylic acid, Fmoc-cis-2-amino-1-cyclohexanecarboxylic acid, Fmoc-trans-2-amino-1-cyclohexanecarboxylic acid, Fmoc-1-amino-1-cyclopentanecarboxylic acid, Fmoc-cis-2-amino-1-cyclopentanecarboxylic acid, Fmoc-1-amino-1-cyclopropanecarboxylic acid, Fmoc-D-2-amino-4-(ethylthio)butyric acid, Fmoc-L-2-amino-4-(ethylthio)butyric acid, Fmoc-L-buthionine, Fmoc-S-methyl-L-Cysteine, Fmoc-2-aminobenzoic acid (anthranillic acid), Fmoc-3-aminobenzoic acid, Fmoc-4-aminobenzoic acid, Fmoc-2-aminobenzophenone-2′-carboxylic acid, Fmoc-N-(4-aminobenzoyl)-β-alanine, Fmoc-2-amino-4,5-dimethoxybenzoic acid, Fmoc-4-aminohippuric acid, Fmoc-2-amino-3-hydroxybenzoic acid, Fmoc-2-amino-5-hydroxybenzoic acid, Fmoc-3-amino-4-hydroxybenzoic acid, Fmoc-4-amino-3-hydroxybenzoic acid, Fmoc-4-amino-2-hydroxybenzoic acid, Fmoc-5-amino-2-hydroxybenzoic acid, Fmoc-2-amino-3-methoxybenzoic acid, Fmoc-4-amino-3-methoxybenzoic acid, Fmoc-2-amino-3-methylbenzoic acid, Fmoc-2-amino-5-methylbenzoic acid, Fmoc-2-amino-6-methylbenzoic acid, Fmoc-3-amino-2-methylbenzoic acid, Fmoc-3-amino-4-methylbenzoic acid, Fmoc-4-amino-3-methylbenzoic acid, Fmoc-3-amino-2-naphtoic acid, Fmoc-D,L-3-amino-3-phenylpropionic acid, Fmoc-L-Methyldopa, Fmoc-2-amino-4,6-dimethyl-3-pyridinecarboxylic acid, Fmoc-D,L-amino-2-thiophenacetic acid, Fmoc4-(carboxymethyl)piperazine, Fmoc-4-carboxypiperazine, Fmoc-4-(carboxymethyl)homopiperazine, Fmoc-4-phenyl4-piperidinecarboxylic acid, Fmoc-L-1,2,3,4-tetrahydronorharman-3-carboxylic acid, Fmoc-L-thiazolidine-4-carboxylic acid, all available from The Peptide Laboratory (Richmond, Calif., USA).

[0268] Non-natural residues can also be added biosynthetically by engineering a suppressor tRNA, typically one that recognizes the UAG stop codon, by chemical aminoacylation with the desired unnatural amino acid. Conventional site-directed mutagenesis is used to introduce the chosen stop codon UAG at the site of interest in the protein gene. When the acylated suppressor tRNA and the mutant gene are combined in an in vitro transcription/translation system, the unnatural amino acid is incorporated in response to the UAG codon to give a protein containing that amino acid at the specified position. Liu et al., Proc. Natl Acad. Sci. USA 96(9): 4780-5 (1999); Wang et al., Science 292(5516): 498-500 (2001).

[0269] Fusion Proteins

[0270] Another aspect of the present invention relates to the fusion of a polypeptide of the present invention to heterologous polypeptides. In a preferred embodiment, the polypeptide of the present invention is a CSP. In a more preferred embodiment, the polypeptide of the present invention that is fused to a heterologous polypeptide which comprises part or all of the amino acid sequence of SEQ ID NO: 95-248, or is a mutein, homologous polypeptide, analog or derivative thereof. In an even more preferred embodiment, the fusion protein is encoded by a nucleic acid molecule comprising all or part of the nucleic acid sequence of SEQ ID NO: 1-94, or comprises all or part of a nucleic acid sequence that selectively hybridizes or is homologous to a nucleic acid molecule comprising a nucleic acid sequence of SEQ ID NO: 1-94.

[0271] The fusion proteins of the present invention will include at least one fragment of a polypeptide of the present invention, which fragment is at least 6, typically at least 8, often at least 15, and usefully at least 16, 17, 18, 19, or 20 amino acids long. The fragment of the polypeptide of the present to be included in the fusion can usefully be at least 25 amino acids long, at least 50 amino acids long, and can be at least 75, 100, or even 150 amino acids long. Fusions that include the entirety of a polypeptide of the present invention have particular utility.

[0272] The heterologous polypeptide included within the fusion protein of the present invention is at least 6 amino acids in length, often at least 8 amino acids in length, and preferably at least 15, 20, or 25 amino acids in length. Fusions that include larger polypeptides, such as the IgG Fc region, and even entire proteins (such as GFP chromophore-containing proteins) are particularly useful.

[0273] As described above in the description of vectors and expression vectors of the present invention, which discussion is incorporated here by reference in its entirety, heterologous polypeptides to be included in the fusion proteins of the present invention can usefully include those designed to facilitate purification and/or visualization of recombinantly-expressed proteins. See, e.g., Ausubel, Chapter 16, (1992), supra. Although purification tags can also be incorporated into fusions that are chemically synthesized, chemical synthesis typically provides sufficient purity that further purification by HPLC suffices; however, visualization tags as above described retain their utility even when the protein is produced by chemical synthesis, and when so included render the fusion proteins of the present invention useful as directly detectable markers of the presence of a polypeptide of the invention.

[0274] As also discussed above, heterologous polypeptides to be included in the fusion proteins of the present invention can usefully include those that facilitate secretion of recombinantly expressed proteins into the periplasmic space or extracellular milieu for prokaryotic hosts or into the culture medium for eukaryotic cells through incorporation of secretion signals and/or leader sequences. For example, a His⁶ tagged protein can be purified on a Ni affinity column and a GST fusion protein can be purified on a glutathione affinity column. Similarly, a fusion protein comprising the Fc domain of IgG can be purified on a Protein A or Protein G column and a fusion protein comprising an epitope tag such as myc can be purified using an immunoaffinity column containing an anti-c-myc antibody. It is preferable that the epitope tag be separated from the protein encoded by the essential gene by an enzymatic cleavage site that can be cleaved after purification. See also the discussion of nucleic acid molecules encoding fusion proteins that may be expressed on the surface of a cell.

[0275] Other useful fusion proteins of the present invention include those that permit use of the polypeptide of the present invention as bait in a yeast two-hybrid system. See Bartel et al. (eds.), The Yeast Two-Hybrid Systems, Oxford University Press (1997); Zhu et al., Yeast Hybrid Technologies, Eaton Publishing (2000); Fields et al., Trends Genet. 10(8): 286-92 (1994); Mendelsohn et al., Curr. Opin. Biotechnol. 5(5): 482-6 (1994); Luban et al., Curr. Opin. Biotechnol. 6(1): 59-64 (1995); Allen et al., Trends Biochem. Sci. 20(12): 511-6 (1995); Drees, Curr. Opin. Chem. Biol. 3(1): 64-70 (1999); Topcu et al., Pharm. Res. 17(9): 1049-55 (2000); Fashena et al., Gene 250(1-2): 1-14 (2000); Colas et al., Nature 380, 548-550 (1996); Norman, T. et al., Science 285, 591-595 (1999); Fabbrizio et al., Oncogene 18, 4357-4363 (1999); Xu et al., Proc Natl Acad Sci USA. 94, 12473-12478 (1997); Yang, et al., Nuc. Acids Res. 23, 1152-1156 (1995); Kolonin et al., Proc Natl Acad Sci USA 95, 14266-14271 (1998); Cohen et al., Proc Natl Acad Sci USA 95, 14272-14277 (1998); Uetz, et al. Nature 403, 623-627(2000); Ito, et al., Proc Natl Acad Sci USA 98, 4569-4574 (2001). Typically, such fusion is to either E. coli LexA or yeast GAL4 DNA binding domains. Related bait plasmids are available that express the bait fused to a nuclear localization signal.

[0276] Other useful fusion proteins include those that permit display of the encoded polypeptide on the surface of a phage or cell, fusions to intrinsically fluorescent proteins, such as green fluorescent protein (GFP), and fusions to the IgG Fc region, as described above.

[0277] The polypeptides of the present invention can also usefully be fused to protein toxins, such as Pseudomonas exotoxin A, diphtheria toxin, shiga toxin A, anthrax toxin lethal factor, or ricin, in order to effect ablation of cells that bind or take up the proteins of the present invention.

[0278] Fusion partners include, inter alia, myc, hemagglutinin (HA), GST, immunoglobulins, β-galactosidase, biotin trpE, protein A, β-lactamase, α-amylase, maltose binding protein, alcohol dehydrogenase, polyhistidine (for example, six histidine at the amino and/or carboxyl terminus of the polypeptide), lacZ, green fluorescent protein (GFP), yeast α mating factor, GAL4 transcription activation or DNA binding domain, luciferase, and serum proteins such as ovalbumin, albumin and the constant domain of IgG. See, e.g., Ausubel (1992), supra and Ausubel (1999), supra. Fusion proteins may also contain sites for specific enzymatic cleavage, such as a site that is recognized by enzymes such as Factor XIII, trypsin, pepsin, or any other enzyme known in the art. Fusion proteins will typically be made by either recombinant nucleic acid methods, as described above, chemically synthesized using techniques well known in the art (e.g., a Merrifield synthesis), or produced by chemical cross-linking.

[0279] Another advantage of fusion proteins is that the epitope tag can be used to bind the fusion protein to a plate or column through an affinity linkage for screening binding proteins or other molecules that bind to the CSP.

[0280] As further described below, the polypeptides of the present invention can readily be used as specific immunogens to raise antibodies that specifically recognize polypeptides of the present invention including CSPs and their allelic variants and homologues. The antibodies, in turn, can be used, inter alia, specifically to assay for the polypeptides of the present invention, particularly CSPs, e.g. by ELISA for detection of protein fluid samples, such as serum, by immunohistochemistry or laser scanning cytometry, for detection of protein in tissue samples, or by flow cytometry, for detection of intracellular protein in cell suspensions, for specific antibody-mediated isolation and/or purification of CSPs, as for example by immunoprecipitation, and for use as specific agonists or antagonists of CSPs.

[0281] One may determine whether polypeptides of the present invention including CSPs, muteins, homologous proteins or allelic variants or fusion proteins of the present invention are functional by methods known in the art. For instance, residues that are tolerant of change while retaining function can be identified by altering the polypeptide at known residues using methods known in the art, such as alanine scanning mutagenesis, Cunningham et al., Science 244(4908): 1081-5 (1989); transposon linker scanning mutagenesis, Chen et al., Gene 263(1-2): 39-48 (2001); combinations of homolog- and alanine-scanning mutagenesis, Jin et al., J. Mol. Biol. 226(3): 851-65 (1992); and combinatorial alanine scanning, Weiss et al., Proc. Natl. Acad. Sci USA 97(16): 8950-4 (2000), followed by functional assay. Transposon linker scanning kits are available commercially (New England Biolabs, Beverly, Mass., USA, catalog. no. E7-102S; EZ::TN™ In-Frame Linker Insertion Kit, catalogue no. EZI04KN, (Epicentre Technologies Corporation, Madison, Wis., USA).

[0282] Purification of the polypeptides or fusion proteins of the present invention is well known and within the skill of one having ordinary skill in the art. See, e.g., Scopes, Protein Purification, 2d.ed. (1987). Purification of recombinantly expressed polypeptides is described above. Purification of chemically-synthesized peptides can readily be effected, e.g., by HPLC.

[0283] Accordingly, it is an aspect of the present invention to provide the isolated polypeptides or fusion proteins of the present invention in pure or substantially pure form in the presence or absence of a stabilizing agent. Stabilizing agents include both proteinaceous and non-proteinaceous material and are well known in the art. Stabilizing agents, such as albumin and polyethylene glycol (PEG) are known and are commercially available.

[0284] Although high levels of purity are preferred when the isolated polypeptide or fusion protein of the present invention are used as therapeutic agents, such as in vaccines and replacement therapy, the isolated polypeptides of the present invention are also useful at lower purity. For example, partially purified polypeptides of the present invention can be used as immunogens to raise antibodies in laboratory animals.

[0285] In a preferred embodiment, the purified and substantially purified polypeptides of the present invention are in compositions that lack detectable ampholytes, acrylamide monomers, bis-acrylamide monomers, and polyacrylamide.

[0286] The polypeptides or fusion proteins of the present invention can usefully be attached to a substrate. The substrate can be porous or solid, planar or non-planar, the bond can be covalent or noncovalent. For example, the peptides of the invention may be stabilized by covalent linkage to albumin. See, U.S. Pat. No. 5,876,969, the contents of which are hereby incorporated in its entirety.

[0287] The polypeptides or fusion proteins of the present invention can also be usefully bound to a porous substrate, commonly a membrane, typically comprising nitrocellulose, polyvinylidene fluoride (PVDF), or cationically derivatized, hydrophilic PVDF; so bound, the polypeptides or fusion proteins of the present invention can be used to detect and quantify antibodies, e.g. in serum, that bind specifically to the immobilized polypeptide or fusion protein of the present invention.

[0288] As another example, the polypeptides or fusion proteins of the present invention can usefully be bound to a substantially nonporous substrate, such as plastic, to detect and quantify antibodies, e.g. in serum, that bind specifically to the immobilized protein of the present invention. Such plastics include polymethylacrylic, polyethylene; polypropylene, polyacrylate, polymethylnethacrylate, polyvinylchloride, polytetrafluoroethylene, polystyrene, polycarbonate, polyacetal, polysulfone, celluloseacetate, cellulosenitrate, nitrocellulose, or mixtures thereof; when the assay is performed in a standard microtiter dish, the plastic is typically polystyrene.

[0289] The polypeptides and fusion proteins of the present invention can also be attached to a substrate suitable for use as a surface enhanced laser desorption ionization source; so attached, the polypeptide or fusion protein of the present invention is useful for binding and then detecting secondary proteins that bind with sufficient affinity or avidity to the surface-bound polypeptide or fusion protein to indicate biologic interaction there between. The polypeptides or fusion proteins of the present invention can also be attached to a substrate suitable for use in surface plasmon resonance detection; so attached, the polypeptide or fusion protein of the present invention is useful for binding and then detecting secondary proteins that bind with sufficient affinity or avidity to the surface-bound polypeptide or fusion protein to indicate biological interaction there between.

Alternative Transcripts

[0290] In antother aspect, the present invention provides splice variants of genes and proteins encoded thereby. The identification of a novel splice variant which encodes an amino acid sequence with a novel region can be targeted for the generation of reagents for use in detection and/or treatment of cancer. The novel amino acid sequence may lead to a unique protein structure, protein subcellular localization, biochemical processing or function of the splice variant. This information can be used to directly or indirectly facilitate the generation of additional or novel therapeutics or diagnostics. The nucleotide sequence in this novel splice variant can be used as a nucleic acid probe for the diagnosis and/or treatment of cancer.

[0291] Specifically, the newly identified sequences may enable the production of new antibodies or compounds directed against the novel region for use as a therapeutic or diagnostic. Alternatively, the newly identified sequences may alter the biochemical or biological properties of the encoded protein in such a way as to enable the generation of improved or different therapeutics targeting this protein.

Antibodies

[0292] In another aspect, the invention provides antibodies, including fragments and derivatives thereof, that bind specifically to polypeptides encoded by the nucleic acid molecules of the invention. In a preferred embodiment, the antibodies are specific for a polypeptide that is a CSP, or a fragment, mutein, derivative, analog or fusion protein thereof. In a more preferred embodiment, the antibodies are specific for a polypeptide that comprises SEQ ID NO: 95-248, or a fragment, mutein, derivative, analog or fusion protein thereof.

[0293] The antibodies of the present invention can be specific for linear epitopes, discontinuous epitopes, or conformational epitopes of such proteins or protein fragments, either as present on the protein in its native conformation or, in some cases, as present on the proteins as denatured, as, e.g., by solubilization in SDS. New epitopes may also be due to a difference in post translational modifications (PTMs) in disease versus normal tissue. For example, a particular site on a CSP may be glycosylated in cancerous cells, but not glycosylated in normal cells or vice versa. In addition, alternative splice forms of a CSP may be indicative of cancer. Differential degradation of the C or N-terminus of a CSP may also be a marker or target for anticancer therapy. For example, a CSP may be N-terminal degraded in cancer cells exposing new epitopes to antibodies which may selectively bind for diagnostic or therapeutic uses.

[0294] As is well known in the art, the degree to which an antibody can discriminate among molecular species in a mixture will depend, in part, upon the conformational relatedness of the species in the mixture; typically, the antibodies of the present invention will discriminate over adventitious binding to non-CSP polypeptides by at least two-fold, more typically by at least 5-fold, typically by more than 10-fold, 25-fold, 50-fold, 75-fold, and often by more than 100-fold, and on occasion by more than 500-fold or 1000-fold. When used to detect the proteins or protein fragments of the present invention, the antibody of the present invention is sufficiently specific when it can be used to determine the presence of the polypeptide of the present invention in samples derived from human colon.

[0295] Typically, the affinity or avidity of an antibody (or antibody multimer, as in the case of an IgM pentamer) of the present invention for a protein or protein fragment of the present invention will be at least about 1×10⁻⁶ molar (M), typically at least about 5×10⁻⁷ M, 1×10⁻⁷ M, with affinities and avidities of at least 1×10⁻⁸ M, 5×10⁻⁹ M, 1×10⁻¹⁰ M and up to 1×10⁻¹³ M proving especially useful.

[0296] The antibodies of the present invention can be naturally occurring forms, such as IgG, IgM, IgD, IgE, IgY, and IgA, from any avian, reptilian, or mammalian species.

[0297] Human antibodies can, but will infrequently, be drawn directly from human donors or human cells. In such case, antibodies to the polypeptides of the present invention will typically have resulted from fortuitous immunization, such as autoimmune immunization, with the polypeptide of the present invention. Such antibodies will typically, but will not invariably, be polyclonal. In addition, individual polyclonal antibodies may be isolated and cloned to generate monoclonals.

[0298] Human antibodies are more frequently obtained using tansgenic animals that express human immunoglobulin genes, which transgenic animals can be affirmatively immunized with the protein immunogen of the present invention. Human Ig-transgenic mice capable of producing human antibodies and methods of producing human antibodies therefrom upon specific immunization are described, inter alia, in U.S. Pat. Nos. 6,162,963; 6,150,584; 6,114,598; 6,075,181; 5,939,598; 5,877,397; 5,874,299; 5,814,318; 5,789,650; 5,770,429; 5,661,016; 5,633,425; 5,625,126; 5,569,825; 5,545,807; 5,545,806, and 5,591,669, the disclosures of which are incorporated herein by reference in their entireties. Such antibodies are typically monoclonal, and are typically produced using techniques developed for production of murine antibodies.

[0299] Human antibodies are particularly useful, and often preferred, when the antibodies of the present invention are to be administered to human beings as in vivo diagnostic or therapeutic agents, since recipient immune response to the administered antibody will often be substantially less than that occasioned by administration of an antibody derived from another species, such as mouse.

[0300] IgG, IgM, IgD, IgE, IgY, and IgA antibodies of the present invention are also usefully obtained from other species, including mammals such as rodents (typically mouse, but also rat, guinea pig, and hamster), lagomorphs (typically rabbits), and also larger mammals, such as sheep, goats, cows, and horses; or egg laying birds or reptiles such as chickens or alligators. In such cases, as with the transgenic human-antibody-producing non-human mammals, fortuitous immunization is not required, and the non-human mammal is typically affirmatively immunized, according to standard immunization protocols, with the polypeptide of the present invention. One form of avian antibodies may be generated using techniques described in WO 00/29444, published 25 May 2000, which is herein incorporated by reference in its entirety.

[0301] As discussed above, virtually all fragments of 8 or more contiguous amino acids of a polypeptide of the present invention can be used effectively as immunogens when conjugated to a carrier, typically a protein such as bovine thyroglobulin, keyhole limpet hemocyanin, or bovine serum albumin, conveniently using a bifunctional linker such as those described elsewhere above, which discussion is incorporated by reference here.

[0302] Immunogenicity can also be conferred by fusion of the polypeptides of the present invention to other moieties. For example, polypeptides of the present invention can be produced by solid phase synthesis on a branched polylysine core matrix; these multiple antigenic peptides (MAPs) provide high purity, increased avidity, accurate chemical definition and improved safety in vaccine development. Tam et al., Proc. Natl. Acad. Sci. USA 85: 5409-5413 (1988); Posnett et al., J. Biol. Chem. 263: 1719-1725 (1988).

[0303] Protocols for immunizing non-human mammals or avian species are well-established in the art. See Harlow et al. (eds.), Using Antibodies: A Laboratory Manual, Cold Spring Harbor Laboratory (1998); Coligan et al. (eds.), Current Protocols in Immunology, John Wiley & Sons, Inc. (2001); Zola, Monoclonal Antibodies: Preparation and Use of Monoclonal Antibodies and Engineered Antibody Derivatives (Basics: From Background to Bench), Springer Verlag (2000); Gross M, Speck J.Dtsch. Tierarztl. Wochenschr. 103: 417-422 (1996). Immunization protocols often include multiple immunizations, either with or without adjuvants such as Freund's complete adjuvant and Freund's incomplete adjuvant, and may include naked DNA immunization. Moss, Semin. Immunol. 2: 317-327 (1990).

[0304] Antibodies from non-human mammals and avian species can be polyclonal or monoclonal, with polyclonal antibodies having certain advantages in immunohistochemical detection of the polypeptides of the present invention and monoclonal antibodies having advantages in identifying and distinguishing particular epitopes of the polypeptides of the present invention. Antibodies from avian species may have particular advantage in detection of the polypeptides of the present invention, in human serum or tissues. Vikinge et al., Biosens. Bioelectron. 13: 1257-1262 (1998). Following immunization, the antibodies of the present invention can be obtained using any art-accepted technique. Such techniques are well known in the art and are described in detail in references such as Coligan, supra; Zola, supra; Howard et al. (eds.), Basic Methods in Antibody Production and Characterization, CRC Press (2000); Harlow, supra; Davis (ed.), Monoclonal Antibody Protocols, Vol. 45, Humana Press (1995); Delves (ed.), Antibody Production: Essential Techniques, John Wiley & Son Ltd (1997); and Kenney, Antibody Solution: An Antibody Methods Manual, Chapman & Hall (1997).

[0305] Briefly, such techniques include, inter alia, production of monoclonal antibodies by hybridomas and expression of antibodies or fragments or derivatives thereof from host cells engineered to express immunoglobulin genes or fragments thereof. These two methods of production are not mutually exclusive: genes encoding antibodies specific for the polypeptides of the present invention can be cloned from hybridomas and thereafter expressed in other host cells. Nor need the two necessarily be performed together: e.g., genes encoding antibodies specific for the polypeptides of the present invention can be cloned directly from B cells known to be specific for the desired protein, as further described in U.S. Pat. No. 5,627,052, the disclosure of which is incorporated herein by reference in its entirety, or from antibody-displaying phage.

[0306] Recombinant expression in host cells is particularly useful when fragments or derivatives of the antibodies of the present invention are desired.

[0307] Host cells for recombinant antibody production of whole antibodies, antibody fragments, or antibody derivatives can be prokaryotic or eukaryotic.

[0308] Prokaryotic hosts are particularly useful for producing phage displayed antibodies of the present invention.

[0309] The technology of phage-displayed antibodies, in which antibody variable region fragments are fused, for example, to the gene III protein (pIII) or gene VIII protein (pVIII) for display on the surface of filamentous phage, such as M13, is by now well-established. See, e.g., Sidhu, Curr. Opin. Biotechnol. 11(6): 610-6 (2000); Griffiths et al., Curr. Opin. Biotechnol. 9(1): 102-8 (1998); Hoogenboom et al., Immunotechnology, 4(1): 1-20 (1998); Rader et al., Current Opinion in Biotechnology 8: 503-508 (1997); Aujame et al., Human Antibodies 8: 155-168 (1997); Hoogenboom, Trends in Biotechnol. 15: 62-70 (1997); de Kruif et al., 17: 453-455 (1996); Barbas et al., Trends in Biotechnol. 14: 230-234 (1996); Winter et al., Ann. Rev. Immunol. 433455 (1994). Techniques and protocols required to generate, propagate, screen (pan), and use the antibody fragments from such libraries have recently been compiled. See, e.g., Barbas (2001), supra; Kay, supra; and Abelson, supra.

[0310] Typically, phage-displayed antibody fragments are scFv fragments or Fab fragments; when desired, full length antibodies can be produced by cloning the variable regions from the displaying phage into a complete antibody and expressing the full length antibody in a further prokaryotic or a eukaryotic host cell. Eukaryotic cells are also useful for expression of the antibodies, antibody fragments, and antibody derivatives of the present invention. For example, antibody fragments of the present invention can be produced in Pichia pastoris and in Saccharomyces cerevisiae. See, e.g., Takahashi et al., Biosci. Biotechnol. Biochem. 64(10): 2138-44 (2000); Freyre et al., J. Biotechnol. 76(2-3):1 57-63 (2000); Fischer et al., Biotechnol. Appl. Biochem. 30 (Pt 2): 117-20 (1999); Pennell et al., Res. Immunol. 149(6): 599-603 (1998); Eldin et al., J. Immunol. Methods. 201(1): 67-75 (1997);, Frenken et al., Res. Immunol. 149(6): 589-99 (1998); and Shusta et al., Nature Biotechnol. 16(8): 773-7 (1998).

[0311] Antibodies, including antibody fragments and derivatives, of the present invention can also be produced in insect cells. See, e.g., Li et al., Protein Expr. Purif. 21(1): 121-8 (2001); Ailor et al., Biotechnol. Bioeng. 58(2-3): 196-203 (1998); Hsu et al., Biotechnol. Prog. 13(1): 96-104 (1997); Edelman et al., Immunology 91(1): 13-9 (1997); and Nesbit et al., J. Immunol. Methods 151(1-2): 201-8 (1992).

[0312] Antibodies and fragments and derivatives thereof of the present invention can also be produced in plant cells, particularly maize or tobacco, Giddings et al., Nature Biotechnol. 18(11): 1151-5 (2000); Gavilondo et al., Biotechniques 29(1): 128-38 (2000); Fischer et al., J. Biol. Regul. Homeost. Agents 14(2): 83-92 (2000); Fischer et al., Biotechnol. Appl. Biochem. 30 (Pt 2): 113-6 (1999); Fischer et al., Biol. Chem. 380(7-8): 825-39 (1999); Russell, Curr. Top. Microbiol. Immunol. 240: 119-38 (1999); and Ma et al., Plant Physiol. 109(2): 341-6 (1995).

[0313] Antibodies, including antibody fragments and derivatives, of the present invention can also be produced in transgenic, non-human, mammalian milk. See, e.g. Pollock et al., J. Immunol Methods. 231: 147-57 (1999); Young et al., Res. Immunol. 149: 609-10 (1998); and Limonta et al., Immunotechnology 1: 107-13 (1995).

[0314] Mammalian cells useful for recombinant expression of antibodies, antibody fragments, and antibody derivatives of the present invention include CHO cells, COS cells, 293 cells, and myeloma cells. Verma et al., J. Immunol. Methods 216(1-2):165-81 (1998) review and compare bacterial, yeast, insect and mammalian expression systems for expression of antibodies. Antibodies of the present invention can also be prepared by cell free translation, as further described in Merk et al., J. Biochem. (Tokyo) 125(2): 328-33 (1999) and Ryabova et al., Nature Biotechnol. 15(1): 79-84 (1997), and in the milk of transgenic animals, as further described in Pollock et al., J. Immunol. Methods 231(1-2): 147-57 (1999).

[0315] The invention further provides antibody fragments that bind specifically to one or more of the polypeptides of the present invention or to one or more of the polypeptides encoded by the isolated nucleic acid molecules of the present invention, or the binding of which can be competitively inhibited by one or more of the polypeptides of the present invention or one or more of the polypeptides encoded by the isolated nucleic acid molecules of the present invention. Among such useful fragments are Fab, Fab′, Fv, F(ab)′₂, and single chain Fv (scFv) fragments. Other useful fragments are described in Hudson, Curr. Opin. Biotechnol. 9(4): 395-402 (1998).

[0316] The present invention also relates to antibody derivatives that bind specifically to one or more of the polypeptides of the present invention, to one or more of the polypeptides encoded by the isolated nucleic acid molecules of the present invention, or the binding of which can be competitively inhibited by one or more of the polypeptides of the present invention or one or more of the polypeptides encoded by the isolated nucleic acid molecules of the present invention.

[0317] Among such useful derivatives are chimeric, primatized, and humanized antibodies; such derivatives are less immunogenic in human beings, and thus are more suitable for in vivo administration, than are unmodified antibodies from non-human mammalian species. Another useful method is PEGylation to increase the serum half life of the antibodies.

[0318] Chimeric antibodies typically include heavy and/or light chain variable regions (including both CDR and framework residues) of immunoglobulins of one species, typically mouse, fused to constant regions of another species, typically human. See, e.g., Morrison et al., Proc. Natl. Acad. Sci USA. 81(21): 6851-5 (1984); Sharon et al., Nature 309(5966): 364-7 (1984); Takeda et al., Nature 314(6010): 4524 (1985); and U.S. Pat. No. 5,807,715 the disclosure of which is incorporated herein by reference in its entirety. Primatized and humanized antibodies typically include heavy and/or light chain CDRs from a murine antibody grafted into a non-human primate or human antibody V region framework, usually further comprising a human constant region, Riechmann et al., Nature 332(6162): 323-7 (1988); Co et al., Nature 351(6326): 501-2 (1991); and U.S. Pat. Nos. 6,054,297; 5,821,337; 5,770,196; 5,766,886; 5,821,123; 5,869,619; 6,180,377; 6,013,256; 5,693,761; and 6,180,370, the disclosures of which are incorporated herein by reference in their entireties. Other useful antibody derivatives of the invention include heteromeric antibody complexes and antibody fusions, such as diabodies (bispecific antibodies), single-chain diabodies, and intrabodies.

[0319] It is contemplated that the nucleic acids encoding the antibodies of the present invention can be operably joined to other nucleic acids forming a recombinant vector for cloning or for expression of the antibodies of the invention. Accordingly, the present invention includes any recombinant vector containing the coding sequences, or part thereof, whether for eukaryotic transduction, transfection or gene therapy. Such vectors may be prepared using conventional molecular biology techniques, known to those with skill in the art, and would comprise DNA encoding sequences for the inmunoglobulin V-regions including framework and CDRs or parts thereof, and a suitable promoter either with or without a signal sequence for intracellular transport Such vectors may be transduced or transfected into eukaryotic cells or used for gene therapy (Marasco et al., Proc. Natl. Acad. Sci. (USA) 90: 7889-7893 (1993); Duan et al., Proc. Natl. Acad. Sci. (USA) 91: 5075-5079 (1994), by conventional techniques, known to those with skill in the art.

[0320] The antibodies of the present invention, including fragments and derivatives thereof, can usefully be labeled. It is, therefore, another aspect of the present invention to provide labeled antibodies that bind specifically to one or more of the polypeptides of the present invention, to one or more of the polypeptides encoded by the isolated nucleic acid molecules of the present invention, or the binding of which can be competitively inhibited by one or more of the polypeptides of the present invention or one or more of the polypeptides encoded by the isolated nucleic acid molecules of the present invention. The choice of label depends, in part, upon the desired use.

[0321] For example, when the antibodies of the present invention are used for immunohistochemical staining of tissue samples, the label can usefully be an enzyme that catalyzes production and local deposition of a detectable product. Enzymes typically conjugated to antibodies to permit their immunohistochemical visualization are well known, and include alkaline phosphatase, β-galactosidase, glucose oxidase, horseradish peroxidase (HRP), and urease. Typical substrates for production and deposition of visually detectable products include o-nitrophenyl-beta-D-galactopyranoside (ONPG); o-phenylenediamine dihydrochloride (OPD); p-nitrophenyl phosphate (PNPP); p-nitrophenyl-beta-D-galactopryanoside (NPG); 3′,3′-diaminobenzidine (DAB); 3-amino-9-ethylcarbazole (AEC); 4-chloro-1-naphthol (CN); 5-bromo-4-chloro-3-indolyl-phosphate (BCIP); ABTS®; BluoGal; iodonitrotetrazolium (INT); nitroblue tetrazolium chloride (NBT); phenazine methosulfate (PMS); phenolphthalein monophosphate (PMP); tetramethyl benzidine (TMB); tetranitroblue tetrazolium (TNBT); X-Gal; X-Gluc; and X-Glucoside.

[0322] Other substrates can be used to produce products for local deposition that are luminescent. For example, in the presence of hydrogen peroxide (H₂O₂), horseradish peroxidase (HRP) can catalyze the oxidation of cyclic diacylhydrazides, such as luminol. Immediately following the oxidation, the luminol is in an excited state (intermediate reaction product), which decays to the ground state by emitting light Strong enhancement of the light emission is produced by enhancers, such as phenolic compounds. Advantages include high sensitivity, high resolution, and rapid detection without radioactivity and requiring only small amounts of antibody. See, e.g., Thorpe et al., Methods Enzymol. 133: 331-53 (1986); Kricka et al., J. Immunoassay 17(1): 67-83 (1996); and Lundqvist et al., J. Biolumin. Chemilumin. 10(6): 353-9 (1995). Kits for such enhanced chemiluminescent detection (ECL) are available commercially. The antibodies can also be labeled using colloidal gold.

[0323] As another example, when the antibodies of the present invention are used, e.g., for flow cytometric detection, for scanning laser cytometric detection, or for fluorescent immunoassay, they can usefully be labeled with fluorophores. There are a wide variety of fluorophore labels that can usefully be attached to the antibodies of the present invention. For flow cytometric applications, both for extracellular detection and for intracellular detection, common useful fluorophores can be fluorescein isothiocyanate (FITC), allophycocyanin (APC), R-phycoerythrin (PE), peridinin chlorophyll protein (PerCP), Texas Red, Cy3, Cy5, fluorescence resonance energy tandem fluorophores such as PerCP-Cy5.5, PE-Cy5, PE-Cy5.5, PE-Cy7, PE-Texas Red, and APC-Cy7.

[0324] Other fluorophores include, inter alia, Alexa Fluor® 350, Alexa Fluor® 488, Alexa Fluor® 532, Alexa Fluor® 546, Alexa Fluor® 568, Alexa Fluor® 594, Alexa Fluor® 647 (monoclonal antibody labeling kits available from Molecular Probes, Inc., Eugene, Oreg., USA), BODIPY dyes, such as BODIPY 493/503, BODIPY FL, BODIPY R6G, BODIPY 530/550, BODIPY TMR, BODIPY 558/568, BODIPY 558/568, BODIPY 564/570, BODIPY 576/589, BODIPY 581/591, BODIPY TR, BODIPY 630/650, BODIPY 650/665, Cascade Blue, Cascade Yellow, Dansyl, lissamine rhodamine B, Marina Blue, Oregon Green 488, Oregon Green 514, Pacific Blue, rhodamine 6G, rhodamine green, rhodamine red, tetramethylrhodamine, Texas Red (available from Molecular Probes, Inc., Eugene, Oreg., USA), and Cy2, Cy3, Cy3.5, Cy5, Cy5.5, Cy7, all of which are also useful for fluorescently labeling the antibodies of the present invention. For secondary detection using labeled avidin, streptavidin, captavidin or neutravidin, the antibodies of the present invention can usefully be labeled with biotin.

[0325] When the antibodies of the present invention are used, e.g., for western blotting applications, they can usefully be labeled with radioisotopes, such as ³³P, ³²P, ³⁵S, ³H, and ¹²⁵I. As another example, when the antibodies of the present invention are used for radioimmunotherapy, the label can usefully be ²²⁸Th, ²²⁷Ac, ²²⁵Ac, ²²³Ra, ²¹³Bi, ²¹²Pb, ²¹²Bi, ²¹¹At, ²⁰³Pb, ¹⁹⁴Os, ¹⁸⁸Re, ¹⁸⁶Re, ¹⁵³Sm, ¹⁴⁹Tb, ¹³¹I, ¹²⁵I, ¹¹¹In, ¹⁰⁵Rh, ^{99m}Tc, ⁹⁷Ru, ⁹⁰Y, ⁹⁰Sr, ⁸⁸Y, ⁷²Se, ⁶⁷Cu, or ⁴⁷Sc.

[0326] As another example, when the antibodies of the present invention are to be used for in vivo diagnostic use, they can be rendered detectable by conjugation to MRI contrast agents, such as gadolinium diethylenetriaminepentaacetic acid (DTPA), Lauffer et al., Radiology 207(2): 529-38 (1998), or by radioisotopic labeling.

[0327] As would be understood, use of the labels described above is not restricted to the application as for which they were mentioned.

[0328] The antibodies of the present invention, including fragments and derivatives thereof, can also be conjugated to toxins, in order to target the toxin's ablative action to cells that display and/or express the polypeptides of the present invention. Commonly, the antibody in such immunotoxins is conjugated to Pseudomonas exotoxin A, diphtheria toxin, shiga toxin A, anthrax toxin lethal factor, or ricin. See Hall (ed.), Immunotoxin Methods and Protocols (Methods in Molecular Biology, vol. 166), Humana Press (2000); and Frankel et al. (eds.), Clinical Applications of Immunotoxins, Springer-Verlag (1998).

[0329] The antibodies of the present invention can usefully be attached to a substrate, and it is, therefore, another aspect of the invention to provide antibodies that bind specifically to one or more of the polypeptides of the present invention, to one or more of the polypeptides encoded by the isolated nucleic acid molecules of the present invention, or the binding of which can be competitively inhibited by one or more of the polypeptides of the present invention or one or more of the polypeptides encoded by the isolated nucleic acid molecules of the present invention, attached to a substrate. Substrates can be porous or nonporous, planar or nonplanar. For example, the antibodies of the present invention can usefully be conjugated to filtration media, such as NHS-activated Sepharose or CNBr-activated Sepharose for purposes of immunoaffinity chromatography. For example, the antibodies of the present invention can usefully be attached to paramagnetic microspheres, typically by biotin-streptavidin interaction, which microsphere can then be used for isolation of cells that express or display the polypeptides of the present invention. As another example, the antibodies of the present invention can usefully be attached to the surface of a microtiter plate for ELISA.

[0330] As noted above, the antibodies of the present invention can be produced in prokaryotic and eukaryotic cells. It is, therefore, another aspect of the present invention to provide cells that express the antibodies of the present invention, including hybridoma cells, B cells, plasma cells, and host cells recombinantly modified to express the antibodies of the present invention.

[0331] In yet a further aspect, the present invention provides aptamers evolved to bind specifically to one or more of the CSPs of the present invention or to polypeptides encoded by the CSNAs of the invention.

[0332] In sum, one of skill in the art, provided with the teachings of this invention, has available a variety of methods which may be used to alter the biological properties of the antibodies of this invention including methods which would increase or decrease the stability or half-life, immunogenicity, toxicity, affinity or yield of a given antibody molecule, or to alter it in any other way that may render it more suitable for a particular application.

Transgenic Animals and Cells

[0333] In another aspect, the invention provides transgenic cells and non-human organisms comprising nucleic acid molecules of the invention. In a preferred embodiment, the transgenic cells and non-human organisms comprise a nucleic acid molecule encoding a CSP. In a preferred embodiment, the CSP comprises an amino acid sequence selected from SEQ ID NO: 95-248, or a fragment, mutein, homologous protein or allelic variant thereof. In another preferred embodiment, the transgenic cells and non-human organism comprise a CSNA of the invention, preferably a CSNA comprising a nucleotide sequence selected from the group consisting of SEQ ID NO: 1-94, or a part, substantially similar nucleic acid molecule, allelic variant or hybridizing nucleic acid molecule thereof.

[0334] In another embodiment, the transgenic cells and non-human organisms have a targeted disruption or replacement of the endogenous orthologue of the human CSG. The transgenic cells can be embryonic stem cells or somatic cells. The transgenic non-human organisms can be chimeric, nonchimeric heterozygotes, and nonchimeric homozygotes. Methods of producing transgenic animals are well known in the art. See, e.g., Hogan et al., Manipulating the Mouse Embryo: A Laboratory Manual, 2d ed., Cold Spring Harbor Press (1999); Jackson et al., Mouse Genetics and Transgenics: A Practical Approach, Oxford University Press (2000); and Pinkert, Transgenic Animal Technology: A Laboratory Handbook, Academic Press (1999).

[0335] Any technique known in the art may be used to introduce a nucleic acid molecule of the invention into an animal to produce the founder lines of transgenic animals. Such techniques include, but are not limited to, pronuclear microinjection. (see, e.g. Paterson et al., Appl. Microbiol. Biotechnol. 40: 691-698 (1994); Carver et al., Biotechnology 11: 1263-1270 (1993); Wright et al., Biotechnology 9: 830-834 (1991); and U.S. Pat. No. 4,873,191, herein incorporated by reference in its entirety); retrovirus-mediated gene transfer into germ lines, blastocysts or embryos (see, e.g., Van der Putten et al., Proc. Natl. Acad. Sci., USA 82: 6148-6152 (1985)); gene targeting in embryonic stem cells (see, e.g., Thompson et al., Cell 56: 313-321 (1989)); electroporation of cells or embryos (see, e.g., Lo, 1983, Mol. Cell. Biol. 3: 1803-1814 (1983)); introduction using a gene gun (see, e.g., Ulmer et al., Science 259: 1745-49 (1993); introducing nucleic acid constructs into embryonic pleuripotent stem cells and transferring the stem cells back into the blastocyst; and sperm-mediated gene transfer (see, e.g., Lavitrano et al., Cell 57: 717-723 (1989)).

[0336] Other techniques include, for example, nuclear transfer into enucleated oocytes of nuclei from cultured embryonic, fetal, or adult cells induced to quiescence (see, e.g., Campell et al., Nature 380: 64-66 (1996); Wilmut et al., Nature 385: 810-813 (1997)). The present invention provides for transgenic animals that carry the transgene (i.e., a nucleic acid molecule of the invention) in all their cells, as well as animals which carry the transgene in some, but not all their cells, i.e. e., mosaic animals or chimeric animals.

[0337] The transgene may be integrated as a single transgene or as multiple copies, such as in concatamers, e. g., head-to-head tandems or head-to-tail tandems. The transgene may also be selectively introduced into and activated in a particular cell type by following, e.g., the teaching of Lasko et al. et al., Proc. Natl. Acad. Sci. USA 89: 6232- 6236 (1992). The regulatory sequences required for such a cell-type specific activation will depend upon the particular cell type of interest, and will be apparent to those of skill in the art.

[0338] Once transgenic animals have been generated, the expression of the recombinant gene may be assayed utilizing standard techniques. Initial screening may be accomplished by Southern blot analysis or PCR techniques to analyze animal tissues to verify that integration of the transgene has taken place. The level of mRNA expression of the transgene in the tissues of the transgenic animals may also be assessed using techniques which include, but are not limited to, Northern blot analysis of tissue samples obtained from the animal, in situ hybridization analysis, and reverse transcriptase-PCR (RT-PCR). Samples of transgenic gene-expressing tissue may also be evaluated immunocytochemically or immunohistochemically using antibodies specific for the transgene product.

[0339] Once the founder animals are produced, they may be bred, inbred, outbred, or crossbred to produce colonies of the particular animal. Examples of such breeding strategies include, but are not limited to: outbreeding of founder animals with more than one integration site in order to establish separate lines; inbreeding of separate lines in order to produce compound transgenics that express the transgene at higher levels because of the effects of additive expression of each transgene; crossing of heterozygous transgenic animals to produce animals homozygous for a given integration site in order to both augment expression and eliminate the need for screening of animals by DNA analysis; crossing of separate homozygous lines to produce compound heterozygous or homozygous lines; and breeding to place the transgene on a distinct background that is appropriate for an experimental model of interest.

[0340] Transgenic animals of the invention have uses which include, but are not limited to, animal model systems useful in elaborating the biological function of polypeptides of the present invention, studying conditions and/or disorders associated with aberrant expression, and in screening for compounds effective in ameliorating such conditions and/or disorders.

[0341] Methods for creating a transgenic animal with a disruption of a targeted gene are also well known in the art. In general, a vector is designed to comprise some nucleotide sequences homologous to the endogenous targeted gene. The vector is introduced into a cell so that it may integrate, via homologous recombination with chromosomal sequences, into the endogenous gene, thereby disrupting the function of the endogenous gene. The transgene may also be selectively introduced into a particular cell type, thus inactivating the endogenous gene in only that cell type. See, e.g., Gu et al., Science 265: 103-106 (1994). The regulatory sequences required for such a cell-type specific inactivation will depend upon the particular cell type of interest, and will be apparent to those of skill in the art. See, e.g., Smithies et al., Nature 317: 230-234 (1985); Thomas et al., Cell 51: 503-512 (1987); Thompson et al., Cell 5: 313-321 (1989).

[0342] In one embodiment, a mutant, non-functional nucleic acid molecule of the invention (or a completely unrelated DNA sequence) flanked by DNA homologous to the endogenous nucleic acid sequence (either the coding regions or regulatory regions of the gene) can be used, with or without a selectable marker and/or a negative selectable marker, to transfect cells that express polypeptides of the invention in vivo. In another embodiment, techniques known in the art are used to generate knockouts in cells that contain, but do not express the gene of interest. Insertion of the DNA construct, via targeted homologous recombination, results in inactivation of the targeted gene. Such approaches are particularly suited in research and agricultural fields where modifications to embryonic stem cells can be used to generate animal offspring with an inactive targeted gene. See, e.g., Thomas, supra and Thompson, supra. However this approach can be routinely adapted for use in humans provided the recombinant DNA constructs are directly administered or targeted to the required site in vivo using appropriate viral vectors that will be apparent to those of skill in the art.

[0343] In further embodiments of the invention, cells that are genetically engineered to express the polypeptides of the invention, or alternatively, that are genetically engineered not to express the polypeptides of the invention (e.g., knockouts) are administered to a patient in vivo. Such cells may be obtained from an animal or patient or an MHC compatible donor and can include, but are not limited to fibroblasts, bone marrow cells, blood cells (e.g., lymphocytes), adipocytes, muscle cells, endothelial cells etc. The cells are genetically engineered in vitro using recombinant DNA techniques to introduce the coding sequence of polypeptides of the invention into the cells, or alternatively, to disrupt the coding sequence and/or endogenous regulatory sequence associated with the polypeptides of the invention, e.g., by transduction (using viral vectors, and preferably vectors that integrate the transgene into the cell genome) or transfection procedures, including, but not limited to, the use of plasmids, cosmids, YACs, naked DNA, electroporation, liposomes, etc.

[0344] The coding sequence of the polypeptides of the invention can be placed under the control of a strong constitutive or inducible promoter or promoter/enhancer to achieve expression, and preferably secretion, of the polypeptides of the invention. The engineered cells which express and preferably secrete the polypeptides of the invention can be introduced into the patient systemically, e.g., in the circulation, or intraperitoneally.

[0345] Alternatively, the cells can be incorporated into a matrix and implanted in the body, e.g., genetically engineered fibroblasts can be implanted as part of a skin graft; genetically engineered endothelial cells can be implanted as part of a lymphatic or vascular graft. See, e.g., U.S. Pat. Nos. 5,399,349 and 5,460,959, each of which is incorporated by reference herein in its entirety.

[0346] When the cells to be administered are non-autologous or non-MHC compatible cells, they can be administered using well known techniques which prevent the development of a host immune response against the introduced cells. For example, the cells may be introduced in an encapsulated form which, while allowing for an exchange of components with the immediate extracellular environment, does not allow the introduced cells to be recognized by the host immune system.

[0347] Transgenic and “knock-out” animals of the invention have uses which include, but are not limited to, animal model systems useful in elaborating the biological function of polypeptides of the present invention, studying conditions and/or disorders associated with aberrant expression, and in screening for compounds effective in ameliorating such conditions and/or disorders.

Computer Readable Means

[0348] A further aspect of the invention is a computer readable means for storing the nucleic acid and amino acid sequences of the instant invention. In a preferred embodiment, the invention provides a computer readable means for storing SEQ ID NO: 95-248 and SEQ ID NO: 1-94 as described herein, as the complete set of sequences or in any combination. The records of the computer readable means can be accessed for reading and display and for interface with a computer system for the application of programs allowing for the location of data upon a query for data meeting certain criteria, the comparison of sequences, the alignment or ordering of sequences meeting a set of criteria, and the like.

[0349] The nucleic acid and amino acid sequences of the invention are particularly useful as components in databases useful for search analyses as well as in sequence analysis algorithms. As used herein, the terms “nucleic acid sequences of the invention” and “amino acid sequences of the invention” mean any detectable chemical or physical characteristic of a polynucleotide or polypeptide of the invention that is or may be reduced to or stored in a computer readable form. These include, without limitation, chromatographic scan data or peak data, photographic data or scan data therefrom, and mass spectrographic data.

[0350] This invention provides computer readable media having stored thereon sequences of the invention. A computer readable medium may comprise one or more of the following: a nucleic acid sequence comprising a sequence of a nucleic acid sequence of the invention; an amino acid sequence comprising an amino acid sequence of the invention; a set of nucleic acid sequences wherein at least one of said sequences comprises the sequence of a nucleic acid sequence of the invention; a set of amino acid sequences wherein at least one of said sequences comprises the sequence of an amino acid sequence of the invention; a data set representing a nucleic acid sequence comprising the sequence of one or more nucleic acid sequences of the invention; a data set representing a nucleic acid sequence encoding an amino acid sequence comprising the sequence of an amino acid sequence of the invention; a set of nucleic acid sequences wherein at least one of said sequences comprises the sequence of a nucleic acid sequence of the invention; a set of amino acid sequences wherein at least one of said sequences comprises the sequence of an amino acid sequence of the invention; a data set representing a nucleic acid sequence comprising the sequence of a nucleic acid sequence of the invention; a data set representing a nucleic acid sequence encoding an amino acid sequence comprising the sequence of an amino acid sequence of the invention. The computer readable medium can be any composition of matter used to store information or data, including, for example, commercially available floppy disks, tapes, hard drives, compact disks, and video disks.

[0351] Also provided by the invention are methods for the analysis of character sequences, particularly genetic sequences. Preferred methods of sequence analysis include, for example, methods of sequence homology analysis, such as identity and similarity analysis, RNA structure analysis, sequence assembly, cladistic analysis, sequence motif analysis, open reading frame determination, nucleic acid base calling, and sequencing chromatogram peak analysis.

[0352] A computer-based method is provided for performing nucleic acid sequence identity or similarity identification. This method comprises the steps of providing a nucleic acid sequence comprising the sequence of a nucleic acid of the invention in a computer readable medium; and comparing said nucleic acid sequence to at least one nucleic acid or amino acid sequence to identify sequence identity or similarity.

[0353] A computer-based method is also provided for performing amino acid homology identification, said method comprising the steps of: providing an amino acid sequence comprising the sequence of an amino acid of the invention in a computer readable medium; and comparing said amino acid sequence to at least one nucleic acid or an amino acid sequence to identify homology.

[0354] A computer-based method is still further provided for assembly of overlapping nucleic acid sequences into a single nucleic acid sequence, said method comprising the steps of: providing a first nucleic acid sequence comprising the sequence of a nucleic acid of the invention in a computer readable medium; and screening for at least one overlapping region between said first nucleic acid sequence and a second nucleic acid sequence. In addition, the invention includes a method of using patterns of expression associated with either the nucleic acids or proteins in a computer-based method to diagnose disease.

Diagnostic Methods for Colon Cancer

[0355] The present invention also relates to quantitative and qualitative diagnostic assays and methods for detecting, diagnosing, monitoring, staging and predicting cancers by comparing expression of a CSNA or a CSP in a human patient that has or may have colon cancer, or who is at risk of developing colon cancer, with the expression of a CSNA or a CSP in a normal human control. For purposes of the present invention, “expression of a CSNA” or “CSNA expression” means the quantity of CSNA MRNA that can be measured by any method known in the art or the level of transcription that can be measured by any method known in the art in a cell, tissue, organ or whole patient. Similarly, the term “expression of a CSP” or “CSP expression” means the amount of CSP that can be measured by any method known in the art or the level of translation of a CSNA that can be measured by any method known in the art.

[0356] The present invention provides methods for diagnosing colon cancer in a patient, in particular adenocarcinoma, by analyzing for changes in levels of CSNA or CSP in cells, tissues, organs or bodily fluids compared with levels of CSNA or CSP in cells, tissues, organs or bodily fluids of preferably the same type from a normal human control, wherein an increase, or decrease in certain cases, in levels of a CSNA or CSP in the patient versus the normal human control is associated with the presence of colon cancer or with a predilection to the disease. In another preferred embodiment, the present invention provides methods for diagnosing colon cancer in a patient by analyzing changes in the structure of the mRNA of a CSG compared to the mRNA from a normal control. These changes include, without limitation, aberrant splicing, alterations in polyadenylation and/or alterations in 5′ nucleotide capping. In yet another preferred embodiment, the present invention provides methods for diagnosing colon cancer in a patient by analyzing changes in a CSP compared to a CSP from a normal patient. These changes include, e.g., alterations, including post translational modifications such as glycosylation and/or phosphorylation of the CSP or changes in the subcellular CSP localization.

[0357] For purposes of the present invention, diagnosing means that CSNA or CSP levels are used to determine the presence or absence of disease in a patient. As will be understood by those of skill in the art, measurement of other diagnostic parameters may be required for definitive diagnosis or determination of the appropriate treatment for the disease. The determination may be made by a clinician, a doctor, a testing laboratory, or a patient using an over the counter test. The patient may have symptoms of disease or may be asymptomatic. In addition, the CSNA or CSP levels of the present invention may be used as screening marker to determine whether further tests or biopsies are warranted. In addition, the CSNA or CSP levels may be used to determine the vulnerability or susceptibility to disease.

[0358] In a preferred embodiment, the expression of a CSNA is measured by determining the amount of a mRNA that encodes an amino acid sequence selected from SEQ ID NO: 95-248, a homolog, an allelic variant, or a fragment thereof. In a more preferred embodiment, the CSNA expression that is measured is the level of expression of a CSNA mRNA selected from SEQ ID NO: 1-94, or a hybridizing nucleic acid, homologous nucleic acid or allelic variant thereof, or a part of any of these nucleic acid molecules. CSNA expression may be measured by any method known in the art, such as those described supra, including measuring mRNA expression by Northern blot, quantitative or qualitative reverse transcriptase PCR (RT-PCR), microarray, dot or slot blots or ill situ hybridization. See, e.g., Ausubel (1992), supra; Ausubel (1999), supra; Sambrook (1989), supra; and Sambrook (2001), supra. CSNA transcription may be measured by any method known in the art including using a reporter gene hooked up to the promoter of a CSG of interest or doing nuclear run-off assays. Alterations in mRNA structure, e.g., aberrant splicing variants, may be determined by any method known in the art, including, RT-PCR followed by sequencing or restriction analysis. As necessary, CSNA expression may be compared to a known control, such as normal colon nucleic acid, to detect a change in expression.

[0359] In another preferred embodiment, the expression of a CSP is measured by determining the level of a CSP having an amino acid sequence selected from the group consisting of SEQ ID NO: 95-248, a homolog, an allelic variant, or a fragment thereof. Such levels are preferably determined in at least one of cells, tissues, organs and/or bodily fluids, including determination of normal and abnormal levels. Thus, for instance, a diagnostic assay in accordance with the invention for diagnosing over- or underexpression of a CSNA or CSP compared to normal control bodily fluids, cells, or tissue samples may be used to diagnose the presence of colon cancer. The expression level of a CSP may be determined by any method known in the art, such as those described supra. In a preferred embodiment, the CSP expression level may be determined by radioimmunoassays, competitive-binding assays, ELISA, Western blot, FACS, immunohistochemistry, immunoprecipitation, proteomic approaches: two-dimensional gel electrophoresis (2D electrophoresis) and non-gel-based approaches such as mass spectrometry or protein interaction profiling. See, e.g, Harlow (1999), supra; Ausubel (1992), supra; and Ausubel (1999), supra. Alterations in the CSP structure may be determined by any method known in the art, including, e.g., using antibodies that specifically recognize phosphoserine, phosphothreonine or phosphotyrosine residues, two-dimensional polyacrylamide gel electrophoresis (2D PAGE) and/or chemical analysis of amino acid residues of the protein. Id.

[0360] In a preferred embodiment, a radioimmunoassay (RIA) or an ELISA is used. An antibody specific to a CSP is prepared if one is not already available. In a preferred embodiment, the antibody is a monoclonal antibody. The anti-CSP antibody is bound to a solid support and any free protein binding sites on the solid support are blocked with a protein such as bovine serum albumin. A sample of interest is incubated with the antibody on the solid support under conditions in which the CSP will bind to the anti-CSP antibody. The sample is removed, the solid support is washed to remove unbound material, and an anti-CSP antibody that is linked to a detectable reagent (a radioactive substance for RIA and an enzyme for ELISA) is added to the solid support and incubated under conditions in which binding of the CSP to the labeled antibody will occur. After binding, the unbound labeled antibody is removed by washing. For an ELISA, one or more substrates are added to produce a colored reaction product that is based upon the amount of a CSP in the sample. For an RIA, the solid support is counted for radioactive decay signals by any method known in the art. Quantitative results for both RIA and ELISA typically are obtained by reference to a standard curve.

[0361] Other methods to measure CSP levels are known in the art. For instance, a competition assay may be employed wherein an anti-CSP antibody is attached to a solid support and an allocated amount of a labeled CSP and a sample of interest are incubated with the solid support. The amount of labeled CSP attached to the solid support can be correlated to the quantity of a CSP in the sample.

[0362] Of the proteomic approaches, 2D PAGE is a well known technique. Isolation of individual proteins from a sample such as serum is accomplished using sequential separation of proteins by isoelectric point and molecular weight. Typically, polypeptides are first separated by isoelectric point (the first dimension) and then separated by size using an electric current (the second dimension). In general, the second dimension is perpendicular to the first dimension. Because no two proteins with different sequences are identical on the basis of both size and charge, the result of 2D PAGE is a roughly square gel in which each protein occupies a unique spot. Analysis of the spots with chemical or antibody probes, or subsequent protein microsequencing can reveal the relative abundance of a given protein and the identity of the proteins in the sample.

[0363] Expression levels of a CSNA can be determined by any method known in the art, including PCR and other nucleic acid methods, such as ligase chain reaction (LCR) and nucleic acid sequence based amplification (NASBA), can be used to detect malignant cells for diagnosis and monitoring of various malignancies. For example, reverse-transcriptase PCR (RT-PCR) is a powerful technique which can be used to detect the presence of a specific mRNA population in a complex mixture of thousands of other mRNA species. In RT-PCR, an mRNA species is first reverse transcribed to complementary DNA (cDNA) with use of the enzyme reverse transcriptase; the cDNA is then amplified as in a standard PCR reaction.

[0364] Hybridization to specific DNA molecules (e.g., oligonucleotides) arrayed on a solid support can be used to both detect the expression of and quantitate the level of expression of one or more CSNAs of interest. In this approach, all or a portion of one or more CSNAs is fixed to a substrate. A sample of interest, which may comprise RNA, e.g., total RNA or polyA-selected mRNA, or a complementary DNA (cDNA) copy of the RNA is incubated with the solid support under conditions in which hybridization will occur between the DNA on the solid support and the nucleic acid molecules in the sample of interest. Hybridization between the substrate-bound DNA and the nucleic acid molecules in the sample can be detected and quantitated by several means, including, without limitation, radioactive labeling or fluorescent labeling of the nucleic acid molecule or a secondary molecule designed to detect the hybrid.

[0365] The above tests can be carried out on samples derived from a variety of cells, bodily fluids and/or tissue extracts such as homogenates or solubilized tissue obtained from a patient. Tissue extracts are obtained routinely from tissue biopsy and autopsy material. Bodily fluids useful in the present invention include blood, urine, saliva or any other bodily secretion or derivative thereof. As used herein “blood” includes whole blood, plasma, serum, circulating epithelial cells, constituents, or any derivative of blood.

[0366] In addition to detection in bodily fluids, the proteins and nucleic acids of the invention are suitable to detection by cell capture technology. Whole cells may be captured by a variety methods for example magnetic separation, such as described in U.S. Pat. Nos. 5,200,084; 5,186,827; 5,108,933; and 4,925,788, the disclosures of which are incorporated herein by reference in their entireties. Epithelial cells may be captured using such products as Dynabeads® or CELLection™ (Dynal Biotech, Oslo, Norway). Alternatively, fractions of blood may be captured, e.g., the buffy coat fraction (50 mm cells isolated from 5 ml of blood) containing epithelial cells. In addition, cancer cells may be captured using the techniques described in WO 00/47998, the disclosure of which is incorporated herein by reference in its entirety. Once the cells are captured or concentrated, the proteins or nucleic acids are detected by the means described in the subject application. Alternatively, nucleic acids may be captured directly from blood samples, see U.S. Pat. Nos. 6,156,504, 5,501,963; or WO 01/42504, the disclosures of which are incorporated herein by reference in their entireties.

[0367] In a preferred embodiment, the specimen tested for expression of CSNA or CSP includes without limitation colon tissue, fecal samples, colonocytes, colon cells grown in cell culture, blood, serum, lymph node tissue, and lymphatic fluid. In another preferred embodiment, especially when metastasis of a primary colon cancer is known or suspected, specimens include, without limitation, tissues from brain, bone, bone marrow, liver, lungs, and adrenal glands. In general, the tissues may be sampled by biopsy, including, without limitation, needle biopsy, e.g., transthoracic needle aspiration, cervical mediatinoscopy, endoscopic lymph node biopsy, video-assisted thoracoscopy, exploratory thoracotomy, bone marrow biopsy and bone marrow aspiration.

[0368] Colonocytes represent an important source of the CSP or CSNA because they provide a picture of the immediate past metabolic history of the GI tract of a subject. In addition, such cells are representative of the cell population from a statistically large sampling frame reflecting the state of the colonic mucosa along the entire length of the colon in a non-invasive manner, in contrast to a limited sampling by colonic biopsy using an invasive procedure involving endoscopy. Specific examples of patents describing the isolation of colonocytes include U.S. Pat. Nos. 6,335,193; 6,020,137 5,741,650; 6,258,541; US 2001 0026925 A1; WO 00/63358 A1, the disclosures of which are incorporated herein by reference in their entireties.

[0369] All the methods of the present invention may optionally include determining the expression levels of one or more other cancer markers in addition to determining the expression level of a CSNA or CSP. In many cases, the use of another cancer marker will decrease the likelihood of false positives or false negatives. In one embodiment, the one or more other cancer markers include other CSNA or CSPs as disclosed herein. Other cancer markers useful in the present invention will depend on the cancer being tested and are known to those of skill in the art. In a preferred embodiment, at least one other cancer marker in addition to a particular CSNA or CSP is measured. In a more preferred embodiment, at least two other additional cancer markers are used. In an even more preferred embodiment, at least three, more preferably at least five, even more preferably at least ten additional cancer markers are used.

Diagnosing

[0370] In one aspect, the invention provides a method for determining the expression levels and/or structural alterations of one or more CSNA and/or CSP in a sample from a patient suspected of having colon cancer. In general, the method comprises the steps of obtaining the sample from the patient, determining the expression level or structural alterations of a CSNA and/or CSP and then ascertaining whether the patient has colon cancer from the expression level of the CSNA or CSP. In general, if high expression relative to a control of a CSNA or CSP is indicative of colon cancer, a diagnostic assay is considered positive if the level of expression of the CSNA or CSP is at least one and a half times higher, and more preferably are at least two times higher, still more preferably five times higher, even more preferably at least ten times higher, than in preferably the same cells, tissues or bodily fluid of a normal human control. In contrast, if low expression relative to a control of a CSNA or CSP is indicative of colon cancer, a diagnostic assay is considered positive if the level of expression of the CSNA or CSP is at least one and a half times lower, and more preferably are at least two times lower, still more preferably five times lower, even more preferably at least ten times lower than in preferably the same cells, tissues or bodily fluid of a normal human control. The normal human control may be from a different patient or from uninvolved tissue of the same patient.

[0371] The present invention also provides a method of determining whether colon cancer has metastasized in a patient. One may identify whether the colon cancer has metastasized by measuring the expression levels and/or structural alterations of one or more CSNAs and/or CSPs in a variety of tissues. The presence of a CSNA or CSP in a tissue other than colon at levels higher than that of corresponding noncancerous tissue (e.g., the same tissue from another individual) is indicative of metastasis if high level expression of a CSNA or CSP is associated with colon cancer. Similarly, the presence of a CSNA or CSP in a tissue other than colon at levels lower than that of corresponding noncancerous tissue is indicative of metastasis if low level expression of a CSNA or CSP is associated with colon cancer. Further, the presence of a structurally altered CSNA or CSP that is associated with colon cancer is also indicative of metastasis.

[0372] In general, if high expression relative to a control of a CSNA or CSP is indicative of metastasis, an assay for metastasis is considered positive if the level of expression of the CSNA or CSP is at least one and a half times higher, and more preferably are at least two times higher, still more preferably five times higher, even more preferably at least ten times higher, than in preferably the same cells, tissues or bodily fluid of a normal human control. In contrast, if low expression relative to a control of a CSNA or CSP is indicative of metastasis, an assay for metastasis is considered positive if the level of expression of the CSNA or CSP is at least one and a half times lower, and more preferably are at least two times lower, still more preferably five times lower, even more preferably at least ten times lower than in preferably the same cells, tissues or bodily fluid of a normal human control.

Staging

[0373] The invention also provides a method of staging colon cancer in a human patient. The method comprises identifyng a human patient having colon cancer and analyzing cells, tissues or bodily fluids from such human patient for expression levels and/or structural alterations of one or more CSNAs or CSPs. First, one or more tumors from a variety of patients are staged according to procedures well known in the art, and the expression levels of one or more CSNAs or CSPs is determined for each stage to obtain a standard expression level for each CSNA and CSP. Then, the CSNA or CSP expression levels of the CSNA or CSP are determined in a biological sample from a patient whose stage of cancer is not known. The CSNA or CSP expression levels from the patient are then compared to the standard expression level. By comparing the expression level of the CSNAs and CSPs from the patient to the standard expression levels, one may determine the stage of the tumor. The same procedure may be followed using structural alterations of a CSNA or CSP to determine the stage of a colon cancer.

Monitoring

[0374] Further provided is a method of monitoring colon cancer in a human patient. One may monitor a human patient to determine whether there has been metastasis and, if there has been, when metastasis began to occur. One may also monitor a human patient to determine whether a preneoplastic lesion has become cancerous. One may also monitor a human patient to determine whether a therapy, e.g., chemotherapy, radiotherapy or surgery, has decreased or eliminated the colon cancer. The monitoring may determine if there has been a reoccurrence and, if so, determine its nature. The method comprises identifying a human patient that one wants to monitor for colon cancer, periodically analyzing cells, tissues or bodily fluids from such human patient for expression levels of one or more CSNAs or CSPs, and comparing the CSNA or CSP levels over time to those CSNA or CSP expression levels obtained previously. Patients may also be monitored by measuring one or more structural alterations in a CSNA or CSP that are associated with colon cancer.

[0375] If increased expression of a CSNA or CSP is associated with metastasis, treatment failure, or conversion of a preneoplastic lesion to a cancerous lesion, then detecting an increase in the expression level of a CSNA or CSP indicates that the tumor is metastasizing, that treatment has failed or that the lesion is cancerous, respectively. One having ordinary skill in the art would recognize that if this were the case, then a decreased expression level would be indicative of no metastasis, effective therapy or failure to progress to a neoplastic lesion. If decreased expression of a CSNA or CSP is associated with metastasis, treatment failure, or conversion of a preneoplastic lesion to a cancerous lesion, then detecting a decrease in the expression level of a CSNA or CSP indicates that the tumor is metastasizing, that treatment has failed or that the lesion is cancerous, respectively. In a preferred embodiment, the levels of CSNAs or CSPs are determined from the same cell type, tissue or bodily fluid as prior patient samples. Monitoring a patient for onset of colon cancer metastasis is periodic and preferably is done on a quarterly basis, but may be done more or less frequently.

[0376] The methods described herein can further be utilized as prognostic assays to identify subjects having or at risk of developing a disease or disorder associated with increased or decreased expression levels of a CSNA and/or CSP. The present invention provides a method in which a test sample is obtained from a human patient and one or more CSNAs and/or CSPs are detected. The presence of higher (or lower) CSNA or CSP levels as compared to normal human controls is diagnostic for the human patient being at risk for developing cancer, particularly colon cancer. The effectiveness of therapeutic agents to decrease (or increase) expression or activity of one or more CSNAs and/or CSPs of the invention can also be monitored by analyzing levels of expression of the CSNAs and/or CSPs in a human patient in clinical trials or in in vitro screening assays such as in human cells. In this way, the gene expression pattern can serve as a marker, indicative of the physiological response of the human patient or cells, as the case may be, to the agent being tested.

Detection of Genetic Lesions or Mutations

[0377] The methods of the present invention can also be used to detect genetic lesions or mutations in a CSG, thereby determining if a human with the genetic lesion is susceptible to developing colon cancer or to determine what genetic lesions are responsible, or are partly responsible, for a person's existing colon cancer. Genetic lesions can be detected, for example, by ascertaining the existence of a deletion, insertion and/or substitution of one or more nucleotides from the CSGs of this invention, a chromosomal rearrangement of a CSG, an aberrant modification of a CSG (such as of the methylation pattern of the genomic DNA), or allelic loss of a CSG. Methods to detect such lesions in the CSG of this invention are known to those having ordinary skill in the art following the teachings of the specification.

Methods of Detecting Noncancerous Colon Diseases

[0378] The present invention also provides methods for determining the expression levels and/or structural alterations of one or more CSNAs and/or CSPs in a sample from a patient suspected of having or known to have a noncancerous colon disease. In general, the method comprises the steps of obtaining a sample from the patient, determining the expression level or structural alterations of a CSNA and/or CSP, comparing the expression level or structural alteration of the CSNA or CSP to a normal colon control, and then ascertaining whether the patient has a noncancerous colon disease. In general, if high expression relative to a control of a CSNA or CSP is indicative of a particular noncancerous colon disease, a diagnostic assay is considered positive if the level of expression of the CSNA or CSP is at least two times higher, and more preferably are at least five times higher, even more preferably at least ten times higher, than in preferably the same cells, tissues or bodily fluid of a normal human control. In contrast, if low expression relative to a control of a CSNA or CSP is indicative of a noncancerous colon disease, a diagnostic assay is considered positive if the level of expression of the CSNA or CSP is at least two times lower, more preferably are at least five times lower, even more preferably at least ten times lower than in preferably the same cells, tissues or bodily fluid of a normal human control. The normal human control may be from a different patient or from uninvolved tissue of the same patient.

[0379] One having ordinary skill in the art may determine whether a CSNA and/or CSP is associated with a particular noncancerous colon disease by obtaining colon tissue from a patient having a noncancerous colon disease of interest and determining which CSNAs and/or CSPs are expressed in the tissue at either a higher or a lower level than in normal colon tissue. In another embodiment, one may determine whether a CSNA or CSP exhibits structural alterations in a particular noncancerous colon disease state by obtaining colon tissue from a patient having a noncancerous colon disease of interest and determining the structural alterations in one or more CSNAs and/or CSPs relative to normal colon tissue.

Methods for Identifying Colon Tissue

[0380] In another aspect, the invention provides methods for identifying colon tissue. These methods are particularly useful in, e.g., forensic science, colon cell differentiation and development, and in tissue engineering.

[0381] In one embodiment, the invention provides a method for determining whether a sample is colon tissue or has colon tissue-like characteristics. The method comprises the steps of providing a sample suspected of comprising colon tissue or having colon tissue-like characteristics, determining whether the sample expresses one or more CSNAs and/or CSPs, and, if the sample expresses one or more CSNAs and/or CSPs, concluding that the sample comprises colon tissue. In a preferred embodiment, the CSNA encodes a polypeptide having an amino acid sequence selected from SEQ ID NO: 95-248, or a homolog, allelic variant or fragment thereof. In a more preferred embodiment, the CSNA has a nucleotide sequence selected from SEQ ID NO: 1-94, or a hybridizing nucleic acid, an allelic variant or a part thereof. Determining whether a sample expresses a CSNA can be accomplished by any method known in the art. Preferred methods include hybridization to microarrays, Northern blot hybridization, and quantitative or qualitative RT-PCR. In another preferred embodiment, the method can be practiced by determining whether a CSP is expressed. Determining whether a sample expresses a CSP can be accomplished by any method known in the art. Preferred methods include Western blot, ELISA, RIA and 2D PAGE. In one embodiment, the CSP has an amino acid sequence selected from SEQ ID NO: 95-248, or a homolog, allelic variant or fragment thereof. In another preferred embodiment, the expression of at least two CSNAs and/or CSPs is determined. In a more preferred embodiment, the expression of at least three, more preferably four and even more preferably five CSNAs and/or CSPs are determined.

[0382] In one embodiment, the method can be used to determine whether an unknown tissue is colon tissue. This is particularly useful in forensic science, in which small, damaged pieces of tissues that are not identifiable by microscopic or other means are recovered from a crime or accident scene. In another embodiment, the method can be used to determine whether a tissue is differentiating or developing into colon tissue. This is important in monitoring the effects of the addition of various agents to cell or tissue culture, e.g., in producing new colon tissue by tissue engineering. These agents include, e.g., growth and differentiation factors, extracellular matrix proteins and culture medium. Other factors that may be measured for effects on tissue development and differentiation include gene transfer into the cells or tissues, alterations in pH, aqueous:air interface and various other culture conditions.

Methods for Producing and Modifying Colon Tissue

[0383] In another aspect, the invention provides methods for producing engineered colon tissue or cells. In one embodiment, the method comprises the steps of providing cells, introducing a CSNA or a CSG into the cells, and growing the cells under conditions in which they exhibit one or more properties of colon tissue cells. In a preferred embodiment, the cells are pleuripotent. As is well known in the art, normal colon tissue comprises a large number of different cell types. Thus, in one embodiment, the engineered colon tissue or cells comprises one of these cell types. In another embodiment, the engineered colon tissue or cells comprises more than one colon cell type. Further, the culture conditions of the cells or tissue may require manipulation in order to achieve full differentiation and development of the colon cell tissue. Methods for manipulating culture conditions are well known in the art.

[0384] Nucleic acid molecules encoding one or more CSPs are introduced into cells, preferably pleuripotent cells. In a preferred embodiment, the nucleic acid molecules encode CSPs having amino acid sequences selected from SEQ ID NO: 95-248, or homologous proteins, analogs, allelic variants or fragments thereof. In a more preferred embodiment, the nucleic acid molecules have a nucleotide sequence selected from SEQ ID NO: 1-94, or hybridizing nucleic acids, allelic variants or parts thereof. In another highly preferred embodiment, a CSG is introduced into the cells. Expression vectors and methods of introducing nucleic acid molecules into cells are well known in the art and are described in detail, supra.

[0385] Artificial colon tissue may be used to treat patients who have lost some or all of their colon function.

Pharmaceutical Compositions

[0386] In another aspect, the invention provides pharmaceutical compositions comprising the nucleic acid molecules, polypeptides, fusion proteins, antibodies, antibody derivatives, antibody fragments, agonists, antagonists, or inhibitors of the present invention. In a preferred embodiment, the pharmaceutical composition comprises a CSNA or part thereof. In a more preferred embodiment, the CSNA has a nucleotide sequence selected from the group consisting of SEQ ID NO: 1-94, a nucleic acid that hybridizes thereto, an allelic variant thereof, or a nucleic acid that has substantial sequence identity thereto. In another preferred embodiment, the pharmaceutical composition comprises a CSP or fragment thereof. In a more preferred embodiment, the pharmaceutical composition comprises a CSP having an amino acid sequence that is selected from the group consisting of SEQ ID NO: 95-248, a polypeptide that is homologous thereto, a fusion protein comprising all or a portion of the polypeptide, or an analog or derivative thereof. In another preferred embodiment, the pharmaceutical composition comprises an anti-CSP antibody, preferably an antibody that specifically binds to a CSP having an amino acid that is selected from the group consisting of SEQ ID NO: 95-248, or an antibody that binds to a polypeptide that is homologous thereto, a fusion protein comprising all or a portion of the polypeptide, or an analog or derivative thereof.

[0387] Due to the association of angiogenesis with cancer vascularization there is great need of new markers and methods for diagnosing angiogenesis activity to identify developing tumors and angiogenesis related diseases. Furthermore, great need is also present for new molecular targets useful in the treatment of angiogenesis and angiogenesis related diseases such as cancer. In addition known modulators of angiogenesis such as endostatin or vascular endothelial growth factor (VEGF). Use of the methods and compositions disclosed herein in combination with anti-angiogenesis drugs, drugs that block the matrix breakdown (such as BMS-275291, Dalteparin (Fragmin®), Suramin), drugs that inhibit endothelial cells (2-methoxyestradiol (2-ME), CC-5013 (Thalidomide Analog), Combretastatin A4 Phosphate, LY317615 (Protein Kinase C Beta Inhibitor), Soy Isoflavone (Genistein; Soy Protein Isolate), Thalidomide), drugs that block activators of angiogenesis (AE-941 (Neovastat™; GW786034), Anti-VEGF Antibody (Bevacizumab; Avastin™), Interferon-alpha, PTK787/ZK 222584, VEGF-Trap, ZD6474), Drugs that inhibit endothelial-specific integrin/survival signaling (EMD 121974, Anti-Anb3 Integrin Antibody (Medi-522; Vitaxin™)).

[0388] Such a composition typically contains from about 0.1 to 90% by weight of a therapeutic agent of the invention formulated in and/or with a pharmaceutically acceptable carrier or excipient.

[0389] Pharmaceutical formulation is a well-established art that is further described in Gennaro (ed.), Remington: The Science and Practice of Pharmacy, 20^{th} ed., Lippincott, Williams & Wilkins (2000); Ansel et al., Pharmaceutical Dosage Forms and Drug Delivery Systems, 7^{th} ed., Lippincott Williams & Wilkins (1999); and Kibbe (ed.), Handbook of Pharmaceutical Excipients American Pharmaceutical Association, 3^{rd} ed. (2000) and thus need not be described in detail herein.

[0390] Briefly, formulation of the pharmaceutical compositions of the present invention will depend upon the route chosen for administration. The pharmaceutical compositions utilized in this invention can be administered by various routes including both enteral and parenteral routes, including oral, intravenous, intramuscular, subcutaneous, inhalation, topical, sublingual, rectal, intra-arterial, intramedullary, intrathecal, intraventricular, transmucosal, transdermal, intranasal, intraperitoneal, intrapulmonary, and intrauterine.

[0391] Oral dosage forms can be formulated as tablets, pills, dragees, capsules, liquids, gels, syrups, slurries, suspensions, and the like, for ingestion by the patient.

[0392] Solid formulations of the compositions for oral administration can contain suitable carriers or excipients, such as carbohydrate or protein fillers, such as sugars, including lactose, sucrose, mannitol, or sorbitol; starch from corn, wheat, rice, potato, or other plants; cellulose, such as methyl cellulose, hydroxypropylmethyl-cellulose, sodium carboxymethylcellulose, or microcrystalline cellulose; gums including arabic and tragacanth; proteins such as gelatin and collagen; inorganics, such as kaolin, calcium carbonate, dicalcium phosphate, sodium chloride; and other agents such as acacia and alginic acid.

[0393] Agents that facilitate disintegration and/or solubilization can be added, such as the cross-linked polyvinyl pyrrolidone, agar, alginic acid, or a salt thereof, such as sodium alginate, microcrystalline cellulose, cornstarch, sodium starch glycolate, and alginic acid.

[0394] Tablet binders that can be used include acacia, methylcellulose, sodium carboxymethylcellulose, polyvinylpyrrolidone (Povidone™), hydroxypropyl methylcellulose, sucrose, starch and ethylcellulose.

[0395] Lubricants that can be used include magnesium stearates, stearic acid, silicone fluid, talc, waxes, oils, and colloidal silica.

[0396] Fillers, agents that facilitate disintegration and/or solubilization, tablet binders and lubricants, including the aforementioned, can be used singly or in combination.

[0397] Solid oral dosage forms need not be uniform throughout. For example, dragee cores can be used in conjunction with suitable coatings, such as concentrated sugar solutions, which can also contain gum arabic, talc, polyvinylpyrrolidone, carbopol gel, polyethylene glycol, and/or titanium dioxide, lacquer solutions, and suitable organic solvents or solvent mixtures.

[0398] Oral dosage forms of the present invention include push-fit capsules made of gelatin, as well as soft, sealed capsules made of gelatin and a coating, such as glycerol or sorbitol. Push-fit capsules can contain active ingredients mixed with a filler or binders, such as lactose or starches, lubricants, such as talc or magnesium stearate, and, optionally, stabilizers. In soft capsules, the active compounds can be dissolved or suspended in suitable liquids, such as fatty oils, liquid, or liquid polyethylene glycol with or without stabilizers.

[0399] Additionally, dyestuffs or pigments can be added to the tablets or dragee coatings for product identification or to characterize the quantity of active compound, i.e., dosage.

[0400] Liquid formulations of the pharmaceutical compositions for oral (enteral) administration are prepared in water or other aqueous vehicles and can contain various suspending agents such as methylcellulose, alginates, tragacanth, pectin, kelgin, carrageenan, acacia, polyvinylpyrrolidone, and polyvinyl alcohol. The liquid formulations can also include solutions, emulsions, syrups and elixirs containing, together with the active compound(s), wetting agents, sweeteners, and coloring and flavoring agents.

[0401] The pharmaceutical compositions of the present invention can also be formulated for parenteral administration. Formulations for parenteral administration can be in the form of aqueous or non-aqueous isotonic sterile injection solutions or suspensions.

[0402] For intravenous injection, water soluble versions of the compounds of the present invention are formulated in, or if provided as a lyophilate, mixed with, a physiologically acceptable fluid vehicle, such as 5% dextrose (“D5”), physiologically buffered saline, 0.9% saline, Hanks' solution, or Ringer's solution. Intravenous formulations may include carriers, excipients or stabilizers including, without limitation, calcium, human serum albumin, citrate, acetate, calcium chloride, carbonate, and other salts.

[0403] Intramuscular preparations, e.g. a sterile formulation of a suitable soluble salt form of the compounds of the present invention, can be dissolved and administered in a pharmaceutical excipient such as Water-for-Injection, 0.9% saline, or 5% glucose solution. Alternatively, a suitable insoluble form of the compound can be prepared and administered as a suspension in an aqueous base or a pharmaceutically acceptable oil base, such as an ester of a long chain fatty acid (e.g., ethyl oleate), fatty oils such as sesame oil, triglycerides, or liposomes.

[0404] Parenteral formulations of the compositions can contain various carriers such as vegetable oils, dimethylacetamide, dimethylformamide, ethyl lactate, ethyl carbonate, isopropyl myristate, ethanol, polyols (glycerol, propylene glycol, liquid polyethylene glycol, and the like).

[0405] Aqueous injection suspensions can also contain substances that increase the viscosity of the suspension, such as sodium carboxymethyl cellulose, sorbitol, or dextran. Non-lipid polycationic amino polymers can also be used for delivery. Optionally, the suspension can also contain suitable stabilizers or agents that increase the solubility of the compounds to allow for the preparation of highly concentrated solutions.

[0406] Pharmaceutical compositions of the present invention can also be formulated to permit injectable, long-term, deposition. Injectable depot forms may be made by forming microencapsulated matrices of the compound in biodegradable polymers such as polylactide-polyglycolide. Depending upon the ratio of drug to polymer and the nature of the particular polymer employed, the rate of drug release can be controlled. Examples of other biodegradable polymers include poly(orthoesters) and poly(anhydrides). Depot injectable formulations are also prepared by entrapping the drug in microemulsions that are compatible with body tissues.

[0407] The pharmaceutical compositions of the present invention can be administered topically. For topical use the compounds of the present invention can also be prepared in suitable forms to be applied to the skin, or mucus membranes of the nose and throat, and can take the form of lotions, creams, ointments, liquid sprays or inhalants, drops, tinctures, lozenges, or throat paints. Such topical formulations further can include chemical compounds such as dimethylsulfoxide (DMSO) to facilitate surface penetration of the active ingredient. In other transdermal formulations, typically in patch-delivered formulations, the pharmaceutically active compound is formulated with one or more skin penetrants, such as 2-N-methyl-pyrrolidone (NMP) or Azone. A topical semi-solid ointment formulation typically contains a concentration of the active ingredient from about 1 to 20%, e.g., 5 to 10%, in a carrier such as a pharmaceutical cream base.

[0408] For application to the eyes or ears, the compounds of the present invention can be presented in liquid or semi-liquid form formulated in hydrophobic or hydrophilic bases as ointments, creams, lotions, paints or powders.

[0409] For rectal administration the compounds of the present invention can be administered in the form of suppositories admixed with conventional carriers such as cocoa butter, wax or other glyceride.

[0410] Inhalation formulations can also readily be formulated. For inhalation, various powder and liquid formulations can be prepared. For aerosol preparations, a sterile formulation of the compound or salt form of the compound may be used in inhalers, such as metered dose inhalers, and nebulizers. Aerosolized forms may be especially useful for treating respiratory disorders.

[0411] Alternatively, the compounds of the present invention can be in powder form for reconstitution in the appropriate pharmaceutically acceptable carrier at the time of delivery.

[0412] The pharmaceutically active compound in the pharmaceutical compositions of the present invention can be provided as the salt of a variety of acids, including but not limited to hydrochloric, sulfuric, acetic, lactic, tartaric, malic, and succinic acid. Salts tend to be more soluble in aqueous or other protonic solvents than are the corresponding free base forms.

[0413] After pharmaceutical compositions have been prepared, they are packaged in an appropriate container and labeled for treatment of an indicated condition.

[0414] The active compound will be present in an amount effective to achieve the intended purpose. The determination of an effective dose is well within the capability of those skilled in the art.

[0415] A “therapeutically effective dose” refers to that amount of active ingredient, for example CSP polypeptide, fusion protein, or fragments thereof, antibodies specific for CSP, agonists, antagonists or inhibitors of CSP, which ameliorates the signs or symptoms of the disease or prevent progression thereof; as would be understood in the medical arts, cure, although desired, is not required.

[0416] The therapeutically effective dose of the pharmaceutical agents of the present invention can be estimated initially by in vitro tests, such as cell culture assays, followed by assay in model animals, usually mice, rats, rabbits, dogs, or pigs. The animal model can also be used to determine an initial preferred concentration range and route of administration.

[0417] For example, the ED50 (the dose therapeutically effective in 50% of the population) and LD50 (the dose lethal to 50% of the population) can be determined in one or more cell culture of animal model systems. The dose ratio of toxic to therapeutic effects is the therapeutic index, which can be expressed as LD50/ED50. Pharmaceutical compositions that exhibit large therapeutic indices are preferred.

[0418] The data obtained from cell culture assays and animal studies are used in formulating an initial dosage range for human use, and preferably provide a range of circulating concentrations that includes the ED50 with little or no toxicity. After administration, or between successive administrations, the circulating concentration of active agent varies within this range depending upon pharmacokinetic factors well known in the art, such as the dosage form employed, sensitivity of the patient, and the route of administration.

[0419] The exact dosage will be determined by the practitioner, in light of factors specific to the subject requiring treatment. Factors that can be taken into account by the practitioner include the severity of the disease state, general health of the subject, age, weight, gender of the subject, diet, time and frequency of administration, drug combination(s), reaction sensitivities, and tolerance/response to therapy. Long-acting pharmaceutical compositions can be administered every 3 to 4 days, every week, or once every two weeks depending on half-life and clearance rate of the particular formulation.

[0420] Normal dosage amounts may vary from 0.1 to 100,000 micrograms, up to a total dose of about 1 g, depending upon the route of administration. Where the therapeutic agent is a protein or antibody of the present invention, the therapeutic protein or antibody agent typically is administered at a daily dosage of 0.01 mg to 30 mg/kg of body weight of the patient (e.g., 1 mg/kg to 5 mg/kg). The pharmaceutical formulation can be administered in multiple doses per day, if desired, to achieve the total desired daily dose.

[0421] Guidance as to particular dosages and methods of delivery is provided in the literature and generally available to practitioners in the art. Those skilled in the art will employ different formulations for nucleotides than for proteins or their inhibitors. Similarly, delivery of polynucleotides or polypeptides will be specific to particular cells, conditions, locations, etc.

[0422] Conventional methods, known to those of ordinary skill in the art of medicine, can be used to administer the pharmaceutical formulation(s) of the present invention to the patient. The pharmaceutical compositions of the present invention can be administered alone, or in combination with other therapeutic agents or interventions.

Therapeutic Methods

[0423] The present invention further provides methods of treating subjects having defects in a gene of the invention, e.g., in expression, activity, distribution, localization, and/or solubility, which can manifest as a disorder of colon function. As used herein, “treating” includes all medically-acceptable types of therapeutic intervention, including palliation and prophylaxis (prevention) of disease. The term “treating” encompasses any improvement of a disease, including minor improvements. These methods are discussed below.

[0424] Gene Therapy and Vaccines

[0425] The isolated nucleic acids of the present invention can also be used to drive in vivo expression of the polypeptides of the present invention. In vivo expression can be driven from a vector, typically a viral vector, often a vector based upon a replication incompetent retrovirus, an adenovirus, or an adeno-associated virus (AAV), for the purpose of gene therapy. In vivo expression can also be driven from signals endogenous to the nucleic acid or from a vector, often a plasmid vector, such as pVAX1 (Invitrogen, Carlsbad, Calif., USA), for purpose of “naked” nucleic acid vaccination, as further described in U.S. Pat. Nos. 5,589,466; 5,679,647; 5,804,566; 5,830,877; 5,843,913; 5,880,104; 5,958,891; 5,985,847; 6,017,897; 6,110,898; 6,204,250, the disclosures of which are incorporated herein by reference in their entireties. For cancer therapy, it is preferred that the vector also be tumor-selective. See, e.g., Doronin et al., J. Virol. 75: 3314-24 (2001).

[0426] In another embodiment of the therapeutic methods of the present invention, a therapeutically effective amount of a pharmaceutical composition comprising a nucleic acid molecule of the present invention is administered. The nucleic acid molecule can be delivered in a vector that drives expression of a CSP, fusion protein, or fragment thereof, or without such vector. Nucleic acid compositions that can drive expression of a CSP are administered, for example, to complement a deficiency in the native CSP, or as DNA vaccines. Expression vectors derived from virus, replication deficient retroviruses, adenovirus, adeno-associated (AAV) virus, herpes virus, or vaccinia virus can be used as can plasmids. See, e.g., Cid-Arregui, supra. In a preferred embodiment, the nucleic acid molecule encodes a CSP having the amino acid sequence of SEQ ID NO: 95-248, or a fragment, fusion protein, allelic variant or homolog thereof.

[0427] In still other therapeutic methods of the present invention, pharmaceutical compositions comprising host cells that express a CSP, fusions, or fragments thereof can be administered. In such cases, the cells are typically autologous, so as to circumvent xenogeneic or allotypic rejection, and are administered to complement defects in CSP production or activity. In a preferred embodiment, the nucleic acid molecules in the cells encode a CSP having the amino acid sequence of SEQ ID NO: 95-248, or a fragment, fusion protein, allelic variant or homolog thereof.

Antisense Administration

[0428] Antisense nucleic acid compositions, or vectors that drive expression of a CSG antisense nucleic acid, are administered to downregulate transcription and/or translation of a CSG in circumstances in which excessive production, or production of aberrant protein, is the pathophysiologic basis of disease.

[0429] Antisense compositions useful in therapy can have a sequence that is complementary to coding or to noncoding regions of a CSG. For example, oligonucleotides derived from the transcription initiation site, e.g., between positions −10 and +10 from the start site, are preferred.

[0430] Catalytic antisense compositions, such as ribozymes, that are capable of sequence-specific hybridization to CSG transcripts, are also useful in therapy. See, e.g., Phylactou, Adv. Drug Deliv. Rev. 44(2-3): 97-108 (2000); Phylactou et al., Hum. Mol. Genet. 7(10): 1649-53 (1998); Rossi, Ciba Found. Symp. 209: 195-204 (1997); and Sigurdsson et al., Trends Biotechnol. 13(8): 286-9 (1995).

[0431] Other nucleic acids useful in the therapeutic methods of the present invention are those that are capable of triplex helix formation in or near the CSG genomic locus. Such triplexing oligonucleotides are able to inhibit transcription. See, e.g., Intody et al., Nucleic Acids Res. 28(21): 4283-90 (2000); and McGuffie et al., Cancer Res. 60(14): 3790-9 (2000). Pharmaceutical compositions comprising such triplex forming oligos (TFOs) are administered in circumstances in which excessive production, or production of aberrant protein, is a pathophysiologic basis of disease.

[0432] In a preferred embodiment, the antisense molecule is derived from a nucleic acid molecule encoding a CSP, preferably a CSP comprising an amino acid sequence of SEQ ID NO: 95-248, or a fragment, allelic variant or homolog thereof. In a more preferred embodiment, the antisense molecule is derived from a nucleic acid molecule having a nucleotide sequence of SEQ ID NO: 1-94, or a part, allelic variant, substantially similar or hybridizing nucleic acid thereof.

Polypeptide Administration

[0433] In one embodiment of the therapeutic methods of the present invention, a therapeutically effective amount of a pharmaceutical composition comprising a CSP, a fusion protein, fragment, analog or derivative thereof is administered to a subject with a clinically-significant CSP defect.

[0434] Protein compositions are administered, for example, to complement a deficiency in native CSP. In other embodiments, protein compositions are administered as a vaccine to elicit a humoral and/or cellular immune response to CSP. The immune response can be used to modulate activity of CSP or, depending on the immunogen, to immunize against aberrant or aberrantly expressed forms, such as mutant or inappropriately expressed isoforms. In yet other embodiments, protein fusions having a toxic moiety are administered to ablate cells that aberrantly accumulate CSP.

[0435] In a preferred embodiment, the polypeptide administered is a CSP comprising an amino acid sequence of SEQ ID NO: 95-248, or a fusion protein, allelic variant, homolog, analog or derivative thereof. In a more preferred embodiment, the polypeptide is encoded by a nucleic acid molecule having a nucleotide sequence of SEQ ID NO: 1-94, or a part, allelic variant, substantially similar or hybridizing nucleic acid thereof.

Antibody, Agonist and Antagonist Administration

[0436] In another embodiment of the therapeutic methods of the present invention, a therapeutically effective amount of a pharmaceutical composition comprising an antibody (including fragment or derivative thereof) of the present invention is administered. As is well known, antibody compositions are administered, for example, to antagonize activity of CSP, or to target therapeutic agents to sites of CSP presence and/or accumulation. In a preferred embodiment, the antibody specifically binds to a CSP comprising an amino acid sequence of SEQ ID NO: 95-248, or a fusion protein, allelic variant, homolog, analog or derivative thereof. In a more preferred embodiment, the antibody specifically binds to a CSP encoded by a nucleic acid molecule having a nucleotide sequence of SEQ ID NO: 1-94, or a part, allelic variant, substantially similar or hybridizing nucleic acid thereof.

[0437] The present invention also provides methods for identifying modulators which bind to a CSP or have a modulatory effect on the expression or activity of a CSP. Modulators which decrease the expression or activity of CSP (antagonists) are believed to be useful in treating colon cancer. Such screening assays are known to those of skill in the art and include, without limitation, cell-based assays and cell-free assays. Small molecules predicted via computer imaging to specifically bind to regions of a CSP can also be designed, synthesized and tested for use in the imaging and treatment of colon cancer. Further, libraries of molecules can be screened for potential anticancer agents by assessing the ability of the molecule to bind to the CSPs identified herein. Molecules identified in the library as being capable of binding to a CSP are key candidates for further evaluation for use in the treatment of colon cancer. In a preferred embodiment, these molecules will downregulate expression and/or activity of a CSP in cells.

[0438] In another embodiment of the therapeutic methods of the present invention, a pharmaceutical composition comprising a non-antibody antagonist of CSP is administered. Antagonists of CSP can be produced using methods generally known in the art. In particular, purified CSP can be used to screen libraries of pharmaceutical agents, often combinatorial libraries of small molecules, to identify those that specifically bind and antagonize at least one activity of a CSP.

[0439] In other embodiments a pharmaceutical composition comprising an agonist of a CSP is administered. Agonists can be identified using methods analogous to those used to identify antagonists.

[0440] In a preferred embodiment, the antagonist or agonist specifically binds to and antagonizes or agonizes, respectively, a CSP comprising an amino acid sequence of SEQ ID NO: 95-248, or a fusion protein, allelic variant, homolog, analog or derivative thereof. In a more preferred embodiment, the antagonist or agonist specifically binds to and antagonizes or agonizes, respectively, a CSP encoded by a nucleic acid molecule having a nucleotide sequence of SEQ ID NO: 1-94, or a part, allelic variant, substantially similar or hybridizing nucleic acid thereof.

Targeting Colon Tissue

[0441] The invention also provides a method in which a polypeptide of the invention, or an antibody thereto, is linked to a therapeutic agent such that it can be delivered to the colon or to specific cells in the colon. In a preferred embodiment, an anti-CSP antibody is linked to a therapeutic agent and is administered to a patient in need of such therapeutic agent. The therapeutic agent may be a toxin, if colon tissue needs to be selectively destroyed. This would be useful for targeting and killing colon cancer cells. In another embodiment, the therapeutic agent may be a growth or differentiation factor, which would be useful for promoting colon cell function.

[0442] In another embodiment, an anti-CSP antibody may be linked to an imaging agent that can be detected using, e.g., magnetic resonance imaging, CT or PET. This would be useful for determining and monitoring colon function, identifying colon cancer tumors, and identifying noncancerous colon diseases.

### EXAMPLES

### Example 1a

### Alternative Splice Variants

[0443] We identified gene transcripts using the Gencarta™ tools (Compugen Ltd., Tel Aviv, Israel) and a variety of public and proprietary databases. These splice variants are either sequences which differ from a previously defined sequence or new uses of known sequences. In general related variants are annotated as DEX0450_XXX.nt.1, DEX0450_XXX.nt.2, DEX0450_XXX.nt.3, etc. The variant DNA sequences encode proteins which differ from a previously defined protein sequence. In relation to the nucleotide sequence naming convention, protein variants are annotated as DEX0450_XXX.aa.1, DEX0450_XXX.aa.2, etc., wherein transcript DEX0450_XXX.nt.1 encodes protein DEX0450_XXX.aa.1. A single transcript may encode a protein from an alternate Open Reading Fram (ORF) which is designated DEX0450_XXX.orf.1. Additionally, multiple transcripts may encode for a single protein. In this case, DEX0450_XXX.nt.1 and DEX0450_XXX.nt.2 will both be associated with DEX0450_XXX-aa.1.

[0444] The mapping of the nucleic acid (“NT”) SEQ ID NO; DEX ID; chromosomal location (if known); open reading frame (ORF) location; amino acid (“AA”) SEQ ID NO;

[0445] AA DEX ID; are shown in the table below.

| SEQ | | | | SEQ | |
|---|---|---|---|---|---|
| ID | | | | ID | |
| NO | DEX ID | Chromo Map | ORF Loc | NO | DEX ID |
| 1 | DEX0450_001.nt.1 | 6p21.31 | 296-932 | 95 | DEX0450_001.aa.1 |
| 1 | DEX0450_001.nt.1 | 6p21.31 | 656-1330 | 96 | DEX0450_001.orf.1 |
| 2 | DEX0450_002.nt.1 | 6p22.1 | 957-1812 | 97 | DEX0450_002.aa.1 |
| 2 | DEX0450_002.nt.1 | 6p22.1 | 847-1809 | 98 | DEX0450_002.orf.1 |
| 3 | DEX0450_003.nt.1 | 19q13.2 | 1-154 | 99 | DEX0450_003.aa.1 |
| 3 | DEX0450_003.nt.1 | 19q13.2 | 62-424 | 100 | DEX0450_003.orf.1 |
| 4 | DEX0450_003.nt.2 | 19q13.2 | 485-1642 | 101 | DEX0450_003.aa.2 |
| 5 | DEX0450_003.nt.3 | 19q13.2 | 100-674 | 102 | DEX0450_003.aa.3 |
| 5 | DEX0450_003.nt.3 | 19q13.2 | 296-1621 | 103 | DEX0450_003.orf.3 |
| 6 | DEX0450_004.nt.1 | 5q32 | 75-371 | 104 | DEX0450_004.aa.1 |
| 7 | DEX0450_005.nt.1 | 8q21.11 | 1-321 | 105 | DEX0450_005.aa.1 |
| 7 | DEX0450_005.nt.1 | 8q21.11 | 1-279 | 106 | DEX0450_005.orf.1 |
| 8 | DEX0450_006.nt.1 | 7q31.33 | 27-326 | 107 | DEX0450_006.aa.1 |
| 9 | DEX0450_007.nt.1 | 7 | 203-1876 | 108 | DEX0450_007.orf.1 |
| 9 | DEX0450_007.nt.1 | 7 | 1-1503 | 109 | DEX0450_007.aa.1 |
| 10 | DEX0450_007.nt.2 | 7q32.1 | 203-1216 | 110 | DEX0450_007.orf.2 |
| 10 | DEX0450_007.nt.2 | 7q32.1 | 1-843 | 111 | DEX0450_007.aa.2 |
| 11 | DEX0450_008.nt.1 | 18q21.33 | 239-1541 | 112 | DEX0450_008.aa.1 |
| 12 | DEX0450_009.nt.1 | 2q14.1 | 2984-5102 | 113 | DEX0450_009.aa.1 |
| 12 | DEX0450_009.nt.1 | 2q14.1 | 714-1391 | 114 | DEX0450_009.orf.1 |
| 13 | DEX0450_009.nt.2 | 2q14.1 | 550-2259 | 115 | DEX0450_009.aa.2 |
| 14 | DEX0450_010.nt.1 | 20p13 | 312-716 | 116 | DEX0450_010.aa.1 |
| 15 | DEX0450_010.nt.2 | 20p13 | 28-276 | 117 | DEX0450_010.aa.2 |
| 15 | DEX0450_010.nt.2 | 20p13 | 1-438 | 118 | DEX0450_010.orf.2 |
| 16 | DEX0450_010.nt.3 | 20p13 | 1389-3234 | 119 | DEX0450_010.aa.3 |
| 16 | DEX0450_010.nt.3 | 20p13 | 1992-3230 | 120 | DEX0450_010.orf.3 |
| 17 | DEX0450_011.nt.1 | 14q24.2 | 108-1100 | 121 | DEX0450_011.aa.1 |
| 18 | DEX0450_012.nt.1 | 17q12 | 116-643 | 122 | DEX0450_012.aa.1 |
| 19 | DEX0450_012.nt.2 | 17q12 | 116-589 | 123 | DEX0450_012.aa.2 |
| 20 | DEX0450_013.nt.1 | 16p13.3 | 358-1095 | 124 | DEX0450_013.aa.1 |
| 21 | DEX0450_014.nt.1 | 6p21.1 | 133-955 | 125 | DEX0450_014.aa.1 |
| 21 | DEX0450_014.nt.1 | 6p21.1 | 119-952 | 126 | DEX0450_014.orf.1 |
| 22 | DEX0450_015.nt.1 | 2p23.3 | 25-6947 | 127 | DEX0450_015.aa.1 |
| 22 | DEX0450_015.nt.1 | 2p23.3 | 3-4955 | 128 | DEX0450_015.orf.1 |
| 23 | DEX0450_015.nt.2 | 2p23.3 | 27-6752 | 129 | DEX0450_015.aa.2 |
| 24 | DEX0450_015.nt.3 | 2p23.3 | 642-1754 | 130 | DEX0450_015.aa.3 |
| 25 | DEX0450_016.nt.1 | 7q11.23 | 55-2968 | 131 | DEX0450_016.aa.1 |
| 25 | DEX0450_016.nt.1 | 7q11.23 | 2-2158 | 132 | DEX0450_016.orf.1 |
| 26 | DEX0450_016.nt.2 | 7q11.23 | 204-2094 | 133 | DEX0450_016.aa.2 |
| 26 | DEX0450_016.nt.2 | 7q11.23 | 139-1284 | 134 | DEX0450_016.orf.2 |
| 27 | DEX0450_016.nt.3 | 7q11.23 | 55-3085 | 135 | DEX0450_016.aa.3 |
| 27 | DEX0450_016.nt.3 | 7q11.23 | 869-2275 | 136 | DEX0450_016.orf.3 |
| 28 | DEX0450_017.nt.1 | 19p13.2 | 1-573 | 137 | DEX0450_017.aa.1 |
| 29 | DEX0450_017.nt.2 | 19p13.2 | 1-356 | 138 | DEX0450_017.aa.2 |
| 29 | DEX0450_017.nt.2 | 19p13.2 | 328-822 | 139 | DEX0450_017.orf.2 |
| 30 | DEX0450_017.nt.3 | 19p13.2 | 1-443 | 140 | DEX0450_017.aa.3 |
| 30 | DEX0450_017.nt.3 | 19p13.2 | 415-909 | 141 | DEX0450_017.orf.3 |
| 31 | DEX0450_018.nt.1 | 7q22.1 | 608-2515 | 142 | DEX0450_018.aa.1 |
| 32 | DEX0450_018.nt.2 | 7q22.1 | 608-2653 | 143 | DEX0450_018.aa.2 |
| 33 | DEX0450_018.nt.3 | 7q22.1 | 607-2570 | 144 | DEX0450_018.aa.3 |
| 33 | DEX0450_018.nt.3 | 7q22.1 | 563-2569 | 145 | DEX0450_018.orf.3 |
| 34 | DEX0450_018.nt.4 | 7q22.1 | 143-1379 | 146 | DEX0450_018.aa.4 |
| 34 | DEX0450_018.nt.4 | 7q22.1 | 612-1376 | 147 | DEX0450_018.orf.4 |
| 35 | DEX0450_019.nt.1 | 6p21.32 | 1091-2030 | 148 | DEX0450_019.aa.1 |
| 35 | DEX0450_019.nt.1 | 6p21.32 | 858-1754 | 149 | DEX0450_019.orf.1 |
| 36 | DEX0450_019.nt.2 | 6p21.32 | 1091-1912 | 150 | DEX0450_019.aa.2 |
| 36 | DEX0450_019.nt.2 | 6p21.32 | 858-1739 | 151 | DEX0450_019.orf.2 |
| 37 | DEX0450_019.nt.3 | 6p21.32 | 1091-1797 | 152 | DEX0450_019.aa.3 |
| 37 | DEX0450_019.nt.3 | 6p21.32 | 858-1748 | 153 | DEX0450_019.orf.3 |
| 38 | DEX0450_020.nt.1 | 10q24.32 | 270-1053 | 154 | DEX0450_020.aa.1 |
| 38 | DEX0450_020.nt.1 | 10q24.32 | 303-1049 | 155 | DEX0450_020.orf.1 |
| 39 | DEX0450_020.nt.2 | 10q24.32 | 823-1222 | 156 | DEX0450_020.aa.2 |
| 39 | DEX0450_020.nt.2 | 10q24.32 | 457-1131 | 157 | DEX0450_020.orf.2 |
| 40 | DEX0450_020.nt.3 | 10q24.32 | 823-1222 | | DEX0450_020.aa.2 |
| 40 | DEX0450_020.nt.3 | 10q24.32 | 3052-4404 | 158 | DEX0450_020.orf.3 |
| 41 | DEX0450_021.nt.1 | 13q21.31 | 227-3805 | 159 | DEX0450_021.aa.1 |
| 42 | DEX0450_022.nt.1 | 19q13.43 | 359-2312 | 160 | DEX0450_022.aa.1 |
| 42 | DEX0450_022.nt.1 | 19q13.43 | 327-1433 | 161 | DEX0450_022.orf.1 |
| 43 | DEX0450_023.nt.1 | 6p24.3 | 1-492 | 162 | DEX0450_023.aa.1 |
| 44 | DEX0450_023.nt.2 | 6p24.3 | 1-96 | 163 | DEX0450_023.aa.2 |
| 44 | DEX0450_023.nt.2 | 6p24.3 | 883-1212 | 164 | DEX0450_023.orf.2 |
| 45 | DEX0450_023.nt.3 | 6p24.3 | 1-122 | 165 | DEX0450_023.aa.3 |
| 45 | DEX0450_023.nt.3 | 6p24.3 | 242-571 | 166 | DEX0450_023.orf.3 |
| 46 | DEX0450_024.nt.1 | 16q22.1 | 142-561 | 167 | DEX0450_024.aa.1 |
| 47 | DEX0450_025.nt.1 | 1q21.3 | 1-222 | 168 | DEX0450_025.aa.1 |
| 47 | DEX0450_025.nt.1 | 1q21.3 | 2-217 | 169 | DEX0450_025.orf.1 |
| 48 | DEX0450_026.nt.1 | 12p13.33 | 1-966 | 170 | DEX0450_026.aa.1 |
| 48 | DEX0450_026.nt.1 | 12p13.33 | 3-962 | 171 | DEX0450_026.orf.1 |
| 49 | DEX0450_026.nt.2 | 12p13.33 | 1-966 | | DEX0450_026.aa.1 |
| 49 | DEX0450_026.nt.2 | 12p13.33 | 3-962 | 172 | DEX0450_026.orf.2 |
| 50 | DEX0450_027.nt.1 | 1p13.3 | 541-2592 | 173 | DEX0450_027.aa.1 |
| 51 | DEX0450_027.nt.2 | 1p13.3 | 540-2595 | | DEX0450_027.aa.1 |
| 52 | DEX0450_028.nt.1 | 2q35 | 152-1650 | 174 | DEX0450_028.aa.1 |
| 52 | DEX0450_028.nt.1 | 2q35 | 105-1325 | 175 | DEX0450_028.orf.1 |
| 53 | DEX0450_029.nt.1 | 1p13.3 | 46-141 | 176 | DEX0450_029.aa.1 |
| 53 | DEX0450_029.nt.1 | 1p13.3 | 960-1166 | 177 | DEX0450_029.orf.1 |
| 54 | DEX0450_030.nt.1 | 1q32.2 | 1-265 | 178 | DEX0450_030.aa.1 |
| 54 | DEX0450_030.nt.1 | 1q32.2 | 7-264 | 179 | DEX0450_030.orf.1 |
| 55 | DEX0450_031.nt.1 | 5q32 | 98-1313 | 180 | DEX0450_031.aa.1 |
| 55 | DEX0450_031.nt.1 | 5q32 | 196-1308 | 181 | DEX0450_031.orf.1 |
| 56 | DEX0450_031.nt.2 | 5q32 | 1-309 | 182 | DEX0450_031.aa.2 |
| 56 | DEX0450_031.nt.2 | 5q32 | 308-613 | 183 | DEX0450_031.orf.2 |
| 57 | DEX0450_032.nt.1 | 19p13.3 | 58-881 | 184 | DEX0450_032.aa.1 |
| 57 | DEX0450_032.nt.1 | 19p13.3 | 197-877 | 185 | DEX0450_032.orf.1 |
| 58 | DEX0450_032.nt.2 | 19p13.3 | 37-1396 | 186 | DEX0450_032.aa.2 |
| 58 | DEX0450_032.nt.2 | 19p13.3 | 481-1392 | 187 | DEX0450_032.orf.2 |
| 59 | DEX0450_032.nt.3 | 19p13.3 | 37-1858 | 188 | DEX0450_032.aa.3 |
| 59 | DEX0450_032.nt.3 | 19p13.3 | 481-1161 | 189 | DEX0450_032.orf.3 |
| 60 | DEX0450_032.nt.4 | 19p13.3 | 37-1336 | 190 | DEX0450_032.aa.4 |
| 60 | DEX0450_032.nt.4 | 19p13.3 | 481-1332 | 191 | DEX0450_032.orf.4 |
| 61 | DEX0450_032.nt.5 | 19p13.3 | 37-1396 | | DEX0450_032.aa.2 |
| 61 | DEX0450_032.nt.5 | 19p13.3 | 481-1392 | 192 | DEX0450_032.orf.5 |
| 62 | DEX0450_032.nt.6 | 19p13.3 | 37-1396 | | DEX0450_032.aa.2 |
| 62 | DEX0450_032.nt.6 | 19p13.3 | 481-1392 | 193 | DEX0450_032.orf.6 |
| 63 | DEX0450_032.nt.7 | 19p13.3 | 37-1396 | | DEX0450_032.aa.2 |
| 63 | DEX0450_032.nt.7 | 19p13.3 | 481-1392 | 194 | DEX0450_032.orf.7 |
| 64 | DEX0450_033.nt.1 | 12q13.13 | 3-944 | 195 | DEX0450_033.aa.1 |
| 64 | DEX0450_033.nt.1 | 12q13.13 | 3-890 | 196 | DEX0450_033.orf.1 |
| 65 | DEX0450_033.nt.2 | 12q13.13 | 73-877 | 197 | DEX0450_033.aa.2 |
| 65 | DEX0450_033.nt.2 | 12q13.13 | 2-1363 | 198 | DEX0450_033.orf.2 |
| 66 | DEX0450_034.nt.1 | 12q13.13 | 362-673 | 199 | DEX0450_034.aa.1 |
| 67 | DEX0450_035.nt.1 | 1q44 | 76-2383 | 200 | DEX0450_035.aa.1 |
| 67 | DEX0450_035.nt.1 | 1q44 | 1-2379 | 201 | DEX0450_035.orf.1 |
| 68 | DEX0450_036.nt.1 | 13q13.3 | 413-1387 | 202 | DEX0450_036.aa.1 |
| 69 | DEX0450_037.nt.1 | 4q22.1 | 88-483 | 203 | DEX0450_037.aa.1 |
| 69 | DEX0450_037.nt.1 | 4q22.1 | 132-479 | 204 | DEX0450_037.orf.1 |
| 70 | DEX0450_038.nt.1 | X; 116878557-116901416 | 560-752 | 205 | DEX0450_038.aa.1 |
| 70 | DEX0450_038.nt.1 | X; 116878557-116901416 | 562-852 | 206 | DEX0450_038.orf.1 |
| 71 | DEX0450_039.nt.1 | 9p13.3 | 367-853 | 207 | DEX0450_039.aa.1 |
| 71 | DEX0450_039.nt.1 | 9p13.3 | 3-851 | 208 | DEX0450_039.orf.1 |
| 72 | DEX0450_039.nt.2 | 9p13.3 | 163-833 | 209 | DEX0450_039.aa.2 |
| 72 | DEX0450_039.nt.2 | 9p13.3 | 37-786 | 210 | DEX0450_039.orf.2 |
| 73 | DEX0450_039.nt.3 | 9p13.3 | 1-431 | 211 | DEX0450_039.aa.3 |
| 73 | DEX0450_039.nt.3 | 9p13.3 | 3-662 | 212 | DEX0450_039.orf.3 |
| 74 | DEX0450_039.nt.4 | 9p13.3 | 602-938 | 213 | DEX0450_039.aa.4 |
| 74 | DEX0450_039.nt.4 | 9p13.3 | 226-933 | 214 | DEX0450_039.orf.4 |
| 75 | DEX0450_039.nt.5 | 9p13.3 | 602-1233 | 215 | DEX0450_039.aa.5 |
| 75 | DEX0450_039.nt.5 | 9p13.3 | 226-1014 | 216 | DEX0450_039.orf.5 |
| 76 | DEX0450_039.nt.6 | 9p13.3 | 602-1055 | 217 | DEX0450_039.aa.6 |
| 76 | DEX0450_039.nt.6 | 9p13.3 | 226-1032 | 218 | DEX0450_039.orf.6 |
| 77 | DEX0450_040.nt.1 | 12q15 | 43-498 | 219 | DEX0450_040.aa.1 |
| 78 | DEX0450_041.nt.1 | 19q13.41 | 1-538 | 220 | DEX0450_041.aa.1 |
| 78 | DEX0450_041.nt.1 | 19q13.41 | 234-782 | 221 | DEX0450_041.orf.1 |
| 79 | DEX0450_042.nt.1 | 10q24.32 | 55-2283 | 222 | DEX0450_042.aa.1 |
| 80 | DEX0450_042.nt.2 | 10q24.32 | 1-867 | 223 | DEX0450_042.aa.2 |
| 80 | DEX0450_042.nt.2 | 10q24.32 | 69-863 | 224 | DEX0450_042.orf.2 |
| 81 | DEX0450_043.nt.1 | 2p15 | 2430-6261 | 225 | DEX0450_043.aa.1 |
| 81 | DEX0450_043.nt.1 | 2p15 | 4360-6255 | 226 | DEX0450_043.orf.1 |
| 82 | DEX0450_044.nt.1 | X; 150551654-150555252 | 82-562 | 227 | DEX0450_044.aa.1 |
| 83 | DEX0450_044.nt.2 | X; 150551654-150575564 | 1038-1976 | 228 | DEX0450_044.aa.2 |
| 84 | DEX0450_044.nt.3 | X; 150551654-150575855 | 409-1311 | 229 | DEX0450_044.aa.3 |
| 85 | DEX0450_045.nt.1. | 12q13.2 | 1-299 | 230 | DEX0450_045.aa.1 |
| 85 | DEX0450_045.nt.1 | 12q13.2 | 4-393 | 231 | DEX0450_045.orf.1 |
| 86 | DEX0450_046.nt.1 | 17q25.3 | 3-786 | 232 | DEX0450_046.aa.1 |
| 86 | DEX0450_046.nt.1 | 17q25.3 | 35-763 | 233 | DEX0450_046.orf.1 |
| 87 | DEX0450_047.nt.1 | 19p13.3 | 88-1375 | 234 | DEX0450_047.aa.1 |
| 87 | DEX0450_047.nt.1 | 19p13.3 | 487-1347 | 235 | DEX0450_047.orf.1 |
| 88 | DEX0450_048.nt.1 | 2p13.2 | 22-766 | 236 | DEX0450_048.aa.1 |
| 88 | DEX0450_048.nt.1 | 2p13.2 | 290-751 | 237 | DEX0450_048.orf.1 |
| 89 | DEX0450_049.nt.1 | 7q22.1 | 139-944 | 238 | DEX0450_049.aa.1 |
| 89 | DEX0450_049.nt.1 | 7q22.1 | 505-918 | 239 | DEX0450_049.orf.1 |
| 90 | DEX0450_050.nt.1 | 8q22.1 | 268-970 | 240 | DEX0450_050.aa.1 |
| 90 | DEX0450_050.nt.1 | 8q22.1 | 15-971 | 241 | DEX0450_050.orf.1 |
| 91 | DEX0450_051.nt.1 | 8p23.1 | 58-287 | 242 | DEX0450_051.aa.1 |
| 91 | DEX0450_051.nt.1 | 8p23.1 | 2-217 | 243 | DEX0450_051.orf.1 |
| 92 | DEX0450_051.nt.2 | 8p23.1 | 49-235 | 244 | DEX0450_051.aa.2 |
| 92 | DEX0450_051.nt.2 | 8p23.1 | 63-233 | 245 | DEX0450_051.orf.2 |
| 93 | DEX0450_052.nt.1 | 9q34.11 | 1-797 | 246 | DEX0450_052.aa.1 |
| 93 | DEX0450_052.nt.1 | 9q34.11 | 322-765 | 247 | DEX0450_052.orf.1 |
| 94 | DEX0450_053.nt.1 | 8q22.1 | 244-945 | 248 | DEX0450_053.aa.1 |

[0446] The polypeptides of the present invention were analyzed and the following attributes were identified; specifically, epitopes, post translational modifications, signal peptides and transmembrane domains. Antigenicity (Epitope) prediction was performed through the antigenic module in the EMBOSS package. Rice, P., EMBOSS: The European Molecular Biology Open Software Suite, Trends in Genetics 16(6): 276-277 (2000). The antigenic module predicts potentially antigenic regions of a protein sequence, using the method of Kolaskar and Tongaonkar. Kolaskar, AS and Tongaonkar, PC., A semi-empirical method for prediction of antigenic determinants on protein antigens, FEBS Letters 276: 172-174.(1990). Examples of post-translational modifications (PTMs) and other motifs of the CSPs of this invention are listed below. In addition, antibodies that specifically bind such post-translational modifications may be useful as a diagnostic or as therapeutic. The PTMs and other motifs were predicted by using the ProSite Dictionary of Proteins Sites and Patterns (Bairoch et al., Nucleic Acids Res. 25(1):217-221 (1997)), the following motifs, including PTMs, were predicted for the CSPs of the invention. The signal peptides were detected by using the SignalP 2.0, see Nielsen et al., Protein Engineering 12, 3-9 (1999). Prediction of transmembrane helices in proteins was performed by the application TMHMM 2.0, “currently the best performing transmembrane prediction program”, according to authors (Krogh et al., Journal of Molecular Biology, 305(3):567-580, (2001); Moller et al., Bioinformatics, 17(7):646-653, (2001); Sonnhammer, et al., A hidden Markov model for predicting transmembrane helices in protein sequences in Glasgow, et al. Ed. Proceedings of the Sixth International Conference on Intelligent Systems for Molecular Biology, pages 175-182, Menlo Park, Calif., 1998. AAAI Press. The PSORT II program may also be used to predict cellular localizations. Horton et al., Intelligent Systems for Molecular Biology 5: 147-152 (1997). The table below includes the following sequence annotations: Signal peptide presence; TM (number of membrane domain, topology in orientation and position); Amino acid location and antigenic index (location, AI score); PTM and other motifs (type, amino acid residue locations); and functional domains (type, amino acid residue locations).

| DEX ID | Sig P | TMHMM | Antigenicity | PTM | Domains |
|---|---|---|---|---|---|
| DEX0450_001.aa.1 | N | 0 - o1-211; | 15-22, 1.083; 60-68, 1.134; | CK2_PHOSPHO_SITE 117-120; MYRISTYL | BCL2_FAMILY 78-179; BCL 78-177; |
| | | | 75-82, 1.087; 35-44, 1.142; | 122-127; PKC_PHOSPHO_SITE 194-196; MYRISTYL 175-180; | Bcl-2 78-177; BH3 74-88; BH1 118-136; |
| | | | 96-102, 1.087; 126-170, | CK2_PHOSPHO_SITE 21-24; | |
| | | | 1.185; 24-29, 1.034; | | |
| | | | 177-208, 1.233; 109-118, | | |
| | | | 1.058; 50-56, 1.081; | | |
| DEX0450_001.orf.1 | N | 0 - o1-225; | 145-181, 1.146; 119-134, | CK2_PHOSPHO_SITE 109-112; MYRISTYL | |
| | | | 1.143; 4-11, 1.088; 196-222, | 186-191; MYRISTYL 116-121; MYRISTYL | |
| | | | 1.177; 38-55, 1.213; 66-100, | 9-14; MYRISTYL 144-149; LEUCINE_ZIPPER | |
| | | | 1.17; 13-28, 1.055; | 16-37; MYRISTYL 71-76; | |
| | | | | PKC_PHOSPHO_SITE 135-137; | |
| | | | | MYRISTYL 185-190; MYRISTYL 189-194; | |
| | | | | MYRISTYL 115-120; | |
| DEX0450_002.aa.1 | N | 0 - o1-284; | 40-64, 1.145; 155-167, 1.188; | PKC_PHOSPHO_SITE 16-18; | BUTYPHLNCDUF 124-148; |
| | | | 255-264, 1.165; 188-213, | CAMP_PHOSPHO_SITE 11-14; | B302 89-245; SPRY 139-264; |
| | | | 1.111; 81-92, 1.153; | ASN_GLYCOSYLATION 222-225; MYRISTYL | PRY 86-138; SPRY |
| | | | 177-183, 1.094; 127-141, | 167-172; MYRISTYL 9-14; | 139-264; BUTYPHLNCDUF |
| | | | 1.201; 18-29, 1.144; | PKC_PHOSPHO_SITE 66-68; | 102-119; SPRY 139-264; |
| | | | 215-250, 1.119; 96-117, | CK2_PHOSPHO_SITE 71-74; | BUTYPHLNCDUF 85-102; |
| | | | 1.136; 143-149, 1.09; | PKC_PHOSPHO_SITE 61-63; | BUTYPHLNCDUF 154-167; |
| | | | | PKC_PHOSPHO_SITE 224-226; | BUTYPHLNCDUF 198-222; |
| | | | | CK2_PHOSPHO_SITE 264-267; | BUTYPHLNCDUF 229-247; |
| | | | | CK2_PHOSPHO_SITE 40-43; MYRISTYL | |
| | | | | 251-256; | |
| DEX0450_002.orf.1 | N | 0 - o1-321; | 10-17, 1.093; 292-301, 1.165; | CAMP_PHOSPHO_SITE 48-51; MYRISTYL | BUTYPHLNCDUF 235-259; |
| | | | 133-154, 1.136; 55-66, 1.144; | 46-51; CK2_PHOSPHO_SITE 108-111; | BUTYPHLNCDUF 191-204; |
| | | | 164-178, 1.201; 180-186, | PKC_PHOSPHO_SITE 103-105; | SPRY 176-301; SPRY 176-301; |
| | | | 1.09; 252-287, 1.119; | CK2_PHOSPHO_SITE 77-80; | BUTYPHLNCDUF 122-139; |
| | | | 77-101, 1.145; 214-220, | CK2_PHOSPHO_SITE 301-304; | PRY 123-175; SPRY |
| | | | 1.094; 192-204, 1.188; | PKC_PHOSPHO_SITE 261-263; | 176-301; B302 126-282, |
| | | | 118-129, 1.153; 38-44, 1.108; | PKC_PHOSPHO_SITE 98-100; | BUTYPHLNCDUF 266-284; |
| | | | 225-250, 1.111; | ASN_GLYCOSYLATION 259-262; MYRISTYL | BUTYPHLNCDUF 161-185; |
| | | | | 204-209; MYRISTYL 288-293; | BUTYPHLNCDUF 139-156; |
| | | | | PKC_PHOSPHO_SITE 53-55; | |
| DEX0450_003.aa.1 | N | 0 - o1-50; | 4-18, 1.11; 25-37, 1.098; | CK2_PHOSPHO_SITE 33-36; MYRISTYL 31-36; | |
| DEX0450_003.orf.1 | N | 0 —i1-121; | 98-109, 1.178; 48-66, 1.112; | PKC_PHOSPHO_SITE 93-95; MYRISTYL 41-46; | |
| | | | 13-21, 1.088; 71-76, 1.06; | PKC_PHOSPHO_SITE 57-59; | |
| | | | 34-40, 1.121; | PKC_PHOSPHO_SITE 1-3; MYRISTYL 109-114; | |
| | | | | MYRISTYL 88-93; | |
| DEX0450_003.aa.2 | N | 0 - o1-386; | 331-341, 1.115; 184-194, | CK2_PHOSPHO_SITE 39-42; MYRISTYL 56-61; | GRAM 91-158; GRAM 91-158; |
| | | | 1.16; 196-203, 1.072; | MYRISTYL 218-223; | |
| | | | 95-101, 1.075; 79-85, 1.049; | PKC_PHOSPHO_SITE 271-273; | |
| | | | 160-173, 1.091; 14-30, 1.129; | ASN_GLYCOSYLATION 348-351; | |
| | | | 103-136, 1.177; 367-378, | CK2_PHOSPHO_SITE 323-326; | |
| | | | 1.132; 308-317, 1.104; | PKC_PHOSPHO_SITE 205-207; | |
| | | | 145-156, 1.141; 230-237, | CK2_PHOSPHO_SITE 224-227; | |
| | | | 1.162; 206-222, 1.204; | PKC_PHOSPHO_SITE 173-175; | |
| | | | 245-254, 1.139; | PKC_PHOSPHO_SITE 241-243; | |
| | | | | PKC_PHOSPHO_SITE 159-161; | |
| | | | | CK2_PHOSPHO_SITE 353-356; | |
| | | | | CK2_PHOSPHO_SITE 352-355; | |
| | | | | PKC_PHOSPHO_SITE 369-371; MYRISTYL | |
| | | | | 52-57; CK2_PHOSPHO_SITE 301-304; | |
| | | | | PKC_PHOSPHO_SITE 377-379; | |
| | | | | PKC_PHOSPHO_SITE 8-10; | |
| | | | | CK2_PHOSPHO_SITE 285-288; | |
| | | | | CK2_PHOSPHO_SITE 241-244; | |
| | | | | ASN_GLYCOSYLATION 279-282; | |
| | | | | PKC_PHOSPHO_SITE 85-87; MYRISTYL 44-49; | |
| | | | | MYRISTYL 360-365; | |
| | | | | CK2_PHOSPHO_SITE 171-174; | |
| | | | | CK2_PHOSPHO_SITE 205-208; | |
| | | | | PKC_PHOSPHO_SITE 18-20; | |
| | | | | CK2_PHOSPHO_SITE 47-50; MYRISTYL | |
| | | | | 270-275; CK2_PHOSPHO_SITE 225-228; | |
| | | | | PKC_PHOSPHO_SITE 72-74; | |
| | | | | PKC_PHOSPHO_SITE 49-51; | |
| DEX0450_003.aa.3 | Y | 0 - o1-190; | 64-69, 1.081; 124-145, 1.097; | AMIDATION 48-51; MYRISTYL 90-95; | |
| | | | 101-121, 1.19; 73-86, 1.112; | MYRISTYL 62-67; MYRISTYL 93-98; | |
| | | | 174-187, 1.132; 5-46, 1.185; | MYRISTYL 84-89; MYRISTYL 138-143; | |
| | | | 151-164, 1.142; | MYRISTYL 74-79; MYRISTYL 148-153; | |
| DEX0450_003.orf.3 | N | 0 - o1-442; | 77-93, 1.129; 421-439, 1.215; | CK2_PHOSPHO_SITE 304-307; | GRAM 154-221; GRAM 154-221; |
| | | | 142-148, 1.049; 247-257, | CK2_PHOSPHO_SITE 386-389; | |
| | | | 1.16; 371-380, 1.104; | PKC_PHOSPHO_SITE 304-306; MYRISTYL | |
| | | | 27-56, 1.19; 394-404, 1.115; | 115-120; PKC_PHOSPHO_SITE 135-137; | |
| | | | 293-300, 1.162; 208-219, | PKC_PHOSPHO_SITE 222-224; | |
| | | | 1.141; 308-317, 1.139; | CK2_PHOSPHO_SITE 415-418; MYRISTYL | |
| | | | 158-164, 1.075; 7-15, 1.105; | 333-338; CK2_PHOSPHO_SITE 287-290; | |
| | | | 269-285, 1.204; 166-199, | MYRISTYL 281-286; MYRISTYL 107-112; | |
| | | | 1.177; 223-236, 1.091; | PKC_PHOSPHO_SITE 236-238; MYRISTYL | |
| | | | 259-266, 1.072; | 422-427; CK2_PHOSPHO_SITE 288-291; | |
| | | | | MYRISTYL 16-21; MYRISTYL 32-37; | |
| | | | | PKC_PHOSPHO_SITE 112-114; | |
| | | | | PKC_PHOSPHO_SITE 71-73; MYRISTYL 18-23; | |
| | | | | PKC_PHOSPHO_SITE 148-150; | |
| | | | | ASN_GLYCOSYLATION 342-345; | |
| | | | | CK2_PHOSPHO_SITE 348-351; | |
| | | | | CK2_PHOSPHO_SITE 234-237; MYRISTYL | |
| | | | | 20-25; PKC_PHOSPHO_SITE 268-270; | |
| | | | | CK2_PHOSPHO_SITE 416-419; | |
| | | | | CK2_PHOSPHO_SITE 268-271; | |
| | | | | CK2_PHOSPHO_SITE 63-66; | |
| | | | | CK2_PHOSPHO_SITE 102-105; MYRISTYL | |
| | | | | 119-124; PKC_PHOSPHO_SITE 81-83; | |
| | | | | CK2_PHOSPHO_SITE 364-367; | |
| | | | | PKC_PHOSPHO_SITE 334-336; | |
| | | | | CK2_PHOSPHO_SITE 110-113; | |
| | | | | ASN_GLYCOSYLATION 411-414; | |
| DEX0450_004.aa.1 | Y | 0 - o1-99; | 23-28, 1.163; 49-56, 1.063; | CAMP_PHOSPHO_SITE 86-89; | KAZALINHBTR 70-81; |
| | | | 5-13, 1.148; 58-69, 1.138; | CK2_PHOSPHO_SITE 41-44; | KAZALINHBTR 59-69; |
| | | | 89-96, 1.075; 76-83, 1.179; | PKC_PHOSPHO_SITE 14-16; AMIDATION | KAZAL 51-99; KAZAL 59-81; |
| | | | | 14-17; CAMP_PHOSPHO_SITE 16-19; | kazal 52-99; |
| | | | | MYRISTYL 39-44; PKC_PHOSPHO_SITE 5-7; | |
| | | | | MYRISTYL 68-73; | |
| DEX0450_005.aa.1 | N | 0 - o1-106; | 35-56, 1.126; 12-29, 1.12; | CK2_PHOSPHO_SITE 30-33; MYRISTYL 60-65; | |
| | | | 80-90, 1.106; 64-72, 1.12; | CK2_PHOSPHO_SITE 91-94; | |
| | | | | PKC_PHOSPHO_SITE 21-23; | |
| DEX0450_005.orf.1 | N | 0 - o1-93; | | MICROBODIES_CTER 91-93; | |
| | | | | PKC_PHOSPHO_SITE 21-23; | |
| | | | | CK2_PHOSPHO_SITE 30-33; | |
| | | | | PKC_PHOSPHO_SITE 91-93; MYRISTYL 60-65; | |
| DEX0450_006.aa.1 | Y | 1 - o1-14; | 92-97, 1.054; 7-25, 1.14; 27-40, | PKC_PHOSPHO_SITE 47-49; | G_PROTEIN_RECEP_F3_4 1-49; |
| | | tm15-37; | 1.171; 48-55, 1.118; 74-81, | PKC_PHOSPHO_SITE 87-89; | |
| | | i38-100; | 1.098; | CAMP_PHOSPHO_SITE 44-47; | |
| | | | | ASN_GLYCOSYLATION 84-87; | |
| | | | | ASN_GLYCOSYLATION 97-100; | |
| DEX0450_007.orf.1 | N | 0 - o1-558; | 91-114, 1.127; 18-44, 1.263; | CAMP_PHOSPHO_SITE 29-32; | GPCRMGR 144-163; |
| | | | 548-555, 1.106; 478-491, | PKC_PHOSPHO_SITE 307-309; | ANF_receptor 126-551; |
| | | | 1.112; 357-364, 1.054; | CAMP_PHOSPHO_SITE 439-442; AMIDATION | GPCRMGR 100-112; |
| | | | 169-183, 1.137; 186-191, | 61-64; PKC_PHOSPHO_SITE 28-30; | ANF_receptor 126-551; |
| | | | 1.104; 516-543, 1.208; | MYRISTYL 118-123; PKC_PHOSPHO_SITE | GPCRMGR 275-292; |
| | | | 130-141, 1.094; 345-351, | 6-8; MYRISTYL 47-52; | ANF_receptor 126-551; |
| | | | 1.048; 458-475, 1.157; | CK2_PHOSPHO_SITE 442-445; | GPCRMGR 129-144; |
| | | | 332-338, 1.065; 65-82, 1.224; | CK2_PHOSPHO_SITE 287-290; MYRISTYL | G_PROTEIN_RECEP_F3_1 |
| | | | 289-294, 1.066; 499-506, | 425-430; CAMP_PHOSPHO_SITE 433-436; | 219-237; |
| | | | 1.108; 118-124, 1.109; | MYRISTYL 301-306; ASN_GLYCOSYLATION | G_PROTEIN_RECEP_F3_1 |
| | | | 299-309, 1.15; 438-444, | 355-358; AMIDATION 431-434; MYRISTYL | 219-237; MTABOTROPICR |
| | | | 1.065; 249-270, 1.144; | 206-211; CAMP_PHOSPHO_SITE 391-394; | 302-313; MTABOTROPICR |
| | | | 372-379, 1.122; 383-392, | CK2_PHOSPHO_SITE 236-239; | 319-331; |
| | | | 1.107; 204-239, 1.119; | ASN_GLYCOSYLATION 152-155; | G-PROTEIN_RECEP_F3_1 |
| | | | 272-278, 1.113; 147-163, | CK2_PHOSPHO_SITE 492-495; | 219-237; |
| | | | 1.121; 49-63, 1.121; | PKC_PHOSPHO_SITE 75-77; | G_PROTEIN_RECEP_F3_1 |
| | | | | PKC_PHOSPHO_SITE 9-11; MYRISTYL 209-214; | 219-237; MTABOTROPICR |
| | | | | PKC_PHOSPHO_SITE 32-34; | 454-465; ANF_receptor |
| | | | | PKC_PHOSPHO_SITE 556-558; MYRISTYL | 126-551; ANF_receptor |
| | | | | 510-515; CK2_PHOSPHO_SITE 199-202; | 126-551; ANF_receptor |
| | | | | PKC_PHOSPHO_SITE 96-98; | 126-551; GPCRMGR 259-275; |
| | | | | CK2_PHOSPHO_SITE 451-454; MYRISTYL | MTABOTROPICR 384-399; |
| | | | | 514-519; CK2_PHOSPHO_SITE 244-247; | G_PROTEIN_RECEP_F3_1 |
| | | | | TYR_PHOSPHO_SITE 446-453; | 219-237; GPCRMGR 240-259; |
| | | | | | GPCRMGR 207-233; |
| | | | | | G_PROTEIN_RECEP_F3_1 |
| | | | | | 219-237; |
| DEX0450_007.aa.1 | Y | 0 - o1-501; | 112-126, 1.137; 61-67, 1.109; | CK2_PHOSPHO_SITE 394-397; | MTABOTROPICR 327-342; |
| | | | 381-387, 1.065; 442-449, | PKC_PHOSPHO_SITE 499-501; | MTABOTROPICR 245-256; |
| | | | 1.108; 34-57, 1.127; 8-25, | PKC_PHOSPHO_SITE 250-252; AMIDATION | MTABOTROPICR 262-274; |
| | | | 1.224; 459-486, 1.208; | 4-7; MYRISTYL 244-249; | MTABOTROPICR 397-408; |
| | | | 90-106, 1.121; 300-307, | CAMP_PHOSPHO_SITE 334-337; | GPCRMGR 43-55; GPCRMGR |
| | | | 1.054; 421-434, 1.112; | CK2_PHOSPHO_SITE 142-145; | 218-235; GPCRMGR 150-176; |
| | | | 275-281, 1.065; 147-182, | TYR_PHOSPHO_SITE 389-396; | GPCRMGR 183-202; |
| | | | 1.119; 192-213, 1.144; | CK2_PHOSPHO_SITE 187-190; | GPCRMGR 87-106; GPCRMGR |
| | | | 288-294, 1.048; 215-221, | CK2_PHOSPHO_SITE 385-388; MYRISTYL | 202-218; GPCRMGR 72-87; |
| | | | 1.113; 491-498, 1.106; | 457-462; ASN_GLYCOSYLATION 95-98; | ANF_receptor 69-494; |
| | | | 326-335, 1.107; 129-134, | CK2_PHOSPHO_SITE 435-438; AMIDATION | G_PROTEIN_RECEP_F3_1 |
| | | | 1.104; 315-322, 1.122; | 374-377; CK2_PHOSPHO_SITE 230-233; | 162-180; |
| | | | 242-252, 1.15; 73-84, 1.094; | MYRISTYL 149-154; PKC_PHOSPHO_SITE | |
| | | | 232-237, 1.066; 401-418, | 18-20; CAMP_PHOSPHO_SITE 382-385; | |
| | | | 1.157; | MYRISTYL 61-66; CK2_PHOSPHO_SITE | |
| | | | | 179-182; MYRISTYL 453-458; | |
| | | | | CAMP_PHOSPHO_SITE 376-379; | |
| | | | | PKC_PHOSPHO_SITE 39-41; MYRISTYL | |
| | | | | 152-157; ASN_GLYCOSYLATION 298-301; | |
| | | | | MYRISTYL 368-373; | |
| DEX0450_007.orf.2 | N | 0 - o1-338; | 169-183, 1.137; 118-124, | PKC_PHOSPHO_SITE 28-30; MYRISTYL | G_PROTEIN_RECEP_F3_1 |
| | | | 1.109; 186-191, 1.104; | 206-211; PKC_PHOSPHO_SITE 32-34; | 219-237; GPCRMGR 240-259; |
| | | | 130-141, 1.094; 301-335, | MYRISTYL 118-123; PKC_PHOSPHO_SITE | G_PROTEIN_RECEP_F3_1 |
| | | | 1.251; 272-278, 1.113; | 96-98; CAMP_PHOSPHO_SITE 29-32; | 219-237; |
| | | | 18-44, 1.263; 49-63, 1.121; | CK2_PHOSPHO_SITE 244-247; | G_PROTEIN_RECEP_F3_1 |
| | | | 249-270, 1.144; 65-82, 1.224; | PKC_PHOSPHO_SITE 6-8; | 219-237; |
| | | | 147-163, 1.121; 204-239, | PKC_PHOSPHO_SITE 9-11; MYRISTYL 209-214; | G_PROTEIN_RECEP_F3_1 |
| | | | 1.119; 289-294, 1.066; | CK2_PHOSPHO_SITE 236-239; | 219-237; GPCRMGR 275-292; |
| | | | 91-114, 1.127; | CK2_PHOSPHO_SITE 199-202; | GPCRMGR 207-233; |
| | | | | ASN_GLYCOSYLATION 152-155; | GPCRMGR 259-275; |
| | | | | CK2_PHOSPHO_SITE 287-290; MYRISTYL | GPCRMGR 129-144; |
| | | | | 306-311; MYRISTYL 47-52; | |
| | | | | PKC_PHOSPHO_SITE 75-77; AMIDATION | GPCRMGR 100-112; |
| | | | | 61-64; | G_PROTEIN_RECEP_F3_1 |
| | | | | | 219-237; |
| | | | | | G_PROTEIN_RECEP_F3_1 |
| | | | | | 219-237; GPCRMGR 144-163; |
| DEX0450_007.aa.2 | Y | 0 - o1-281; | 90-106, 1.121; 73-84, 1.094; | ASN_GLYCOSYLATION 95-98; MYRISTYL | G_PROTEIN_RECEP_F3_1 |
| | | | 112-126, 1.137; 34-57, 1.127; | 61-66; MYRISTYL 249-254; | 162-180; GPCRMGR 87-106; |
| | | | 129-134, 1.104; 192-213, | CK2_PHOSPHO_SITE 142-145; | GPCRMGR 43-55; |
| | | | 1.144; 232-237, 1.066; | CK2_PHOSPHO_SITE 179-182; AMIDATION | GPCRMGR 72-87; GPCRMGR |
| | | | 8-25, 1.224; 147-182, 1.119; | 4-7; CK2_PHOSPHO_SITE 187-190; | 218-235; GPCRMGR 202-218; |
| | | | 215-221, 1.113; 244-278, | PKC_PHOSPHO_SITE 39-41; MYRISTYL | GPCRMGR 150-176; |
| | | | 1.251; 61-67, 1.109; | 149-154; PKC_PHOSPHO_SITE 18-20; | GPCRMGR 183-202; |
| | | | | MYRISTYL 152-157; CK2_PHOSPHO_SITE | |
| | | | | 230-233; | |
| DEX0450_008.aa.1 | N | 0 - o1-433; | 12-29, 1.113; 239-245, 1.086; | PKC_PHOSPHO_SITE 165-167; | MASPIN 180-195; SERPIN |
| | | | 342-355, 1.105; 391-403, | PKC_PHOSPHO_SITE 143-145; | 86-433; MASPIN 201-215; |
| | | | 1.094; 81-98, 1.189; | PKC_PHOSPHO_SITE 30-32; | MASPIN 251-264; MASPIN |
| | | | 216-227, 1.154; 424-430, | ASN_GLYCOSYLATION 419-422; MYRISTYL | 319-331; MASPIN 387-405; |
| | | | 1.092; 269-278, 1.116; | 364-369; CK2_PHOSPHO_SITE 193-196; | SERPIN 406-416; |
| | | | 42-54, 1.192; 409-417, 1.125; | PKC_PHOSPHO_SITE 100-102; | serpin 80-433; MASPIN |
| | | | 171-177, 1.04; 111-162, | ASN_GLYCOSYLATION 191-194; MYRISTYL | 342-360; |
| | | | 1.158; 285-293, 1.128; | 370-375; MYRISTYL 188-193; | |
| | | | 101-108, 1.081; 369-384, | CK2_PHOSPHO_SITE 299-302; | |
| | | | 1.231; 326-335, 1.103; | CK2_PHOSPHO_SITE 210-213; | |
| | | | 61-67, 1.046; | ASN_GLYCOSYLATION 246-249; | |
| | | | | PKC_PHOSPHO_SITE 166-168; MYRISTYL | |
| | | | | 265-270; ASN_GLYCOSYLATION 9-12; | |
| | | | | CK2_PHOSPHO_SITE 77-80; | |
| | | | | ASN_GLYCOSYLATION 157-160; | |
| | | | | PKC_PHOSPHO_SITE 39-41; | |
| | | | | PKC_PHOSPHO_SITE 193-195; | |
| DEX0450_009.aa.1 | N | 1 - o1-393; | 355-374, 1.115; 341-353, | MYRISTYL 244-249; PKC_PHOSPHO_SITE | |
| | | tm394-416; | 1.232; 391-422, 1.231; | 678-680; PKC_PHOSPHO_SITE 578-580; | |
| | | i417-705; | 18-34, 1.218; 117-134, 1.11; | MYRISTYL 530-535; MYRISTYL 467-472; | |
| | | | 81-104, 1.19; 37-50, 1.233; | PKC_PHOSPHO_SITE 95-97; | |
| | | | 500-511, 1.095; 607-617, | PKC_PHOSPHO_SITE 169-171; | |
| | | | 1.17; 622-644, 1.18; | CK2_PHOSPHO_SITE 108-111; | |
| | | | 518-547, 1.166; 551-579, | ASN_GLYCOSYLATION 385-388; MYRISTYL | |
| | | | 1.243; 158-190, 1.213; | 468-473; CK2_PHOSPHO_SITE 302-305; | |
| | | | 54-72, 1.198; 139-147, 1.061; | PKC_PHOSPHO_SITE 495-497; MYRISTYL | |
| | | | 306-319, 1.186; 247-270, | 306-311; CK2_PHOSPHO_SITE 6-9; | |
| | | | 1.13; 667-702, 1.182; | PKC_PHOSPHO_SITE 11-13; | |
| | | | 192-204, 1.118; 276-299, | PKC_PHOSPHO_SITE 372-374; | |
| | | | 1.146; 455-463, 1.17; | PKC_PHOSPHO_SITE 599-601; MYRISTYL | |
| | | | 588-598, 1.073; 233-239, | 583-588; MYRISTYL 565-570; | |
| | | | 1.076; 425-444, 1.136; | PKC_PHOSPHO_SITE 644-646; MYRISTYL | |
| | | | 207-221, 1.189; 485-491, | 572-577; TYR_PHOSPHO_SITE 680-687; | |
| | | | 1.077; 378-389, 1.136; | PKC_PHOSPHO_SITE 289-291; | |
| | | | | PKC_PHOSPHO_SITE 256-258; | |
| | | | | TYR_PHOSPHO_SITE 648-654; | |
| | | | | CK2_PHOSPHO_SITE 360-363; | |
| | | | | PKC_PHOSPHO_SITE 323-325; MYRISTYL | |
| | | | | 213-218; ASN_GLYCOSYLATION 638-641; | |
| | | | | PKC_PHOSPHO_SITE 510-512; MYRISTYL | |
| | | | | 520-525; CK2_PHOSPHO_SITE 603-606; | |
| | | | | PKC_PHOSPHO_SITE 482-484; MYRISTYL | |
| | | | | 694-699; CK2_PHOSPHO_SITE 640-643; | |
| | | | | PKC_PHOSPHO_SITE 107-109; | |
| DEX0450_009.orf.1 | N | 5 - o1-30; | 4-20, 1.213; 182-198, 1.119; | MYRISTYL 32-37; MYRISTYL 121-126; | DUF6 41-173; |
| | | tm31-50; | 65-87, 1.16; 31-37, 1.082; | PKC_PHOSPHO_SITE 22-24; MYRISTYL | |
| | | i51-61; | 95-107, 1.223; 39-51, 1.222; | 107-112; CK2_PHOSPHO_SITE 87-90; | |
| | | tm62-84; | 209-222, 1.106; 148-177, | MYRISTYL 110-115; CK2_PHOSPHO_SITE | |
| | | o85-98; | 1.21; 109-146, 1.134; | 220-223; | |
| | | tm99-121; | | | |
| | | i122-122; | | | |
| | | tm123-145; | | | |
| | | o146-154; | | | |
| | | tm155-177; | | | |
| | | i178-226; | | | |
| DEX0450_009.aa.2 | N | 10 —i1-68; | 406-443, 1.134; 217-235, | MYRISTYL 404-409; PKC_PHOSPHO_SITE | DUF6 338-470; |
| | | tm69-86; | 1.075; 29-40, 1.053; | 505-507; MYRISTYL 407-412; | |
| | | o87-100; | 479-495, 1.119; 146-151, | PKC_PHOSPHO_SITE 319-321; | |
| | | tm101-120; | 1.087; 445-474, 1.21; | PKC_PHOSPHO_SITE 188-190; | |
| | | i121-239; | 71-96, 1.26; 515-526, 1.172; | PKC_PHOSPHO_SITE 175-177; | |
| | | tm240-262; | 42-53, 1.213; 135-141, 1.058; | ASN_GLYCOSYLATION 255-258; MYRISTYL | |
| | | o263-266; | 544-563, 1.229; 392-404, | 537-542; CK2_PHOSPHO_SITE 159-162; | |
| | | tm267-289; | 1.223; 109-121, 1.18; | CK2_PHOSPHO_SITE 384-387; | |
| | | i290-295; | 528-536, 1.067; 12-27, 1.114; | PKC_PHOSPHO_SITE 26-28; | |
| | | tm296-318; | 191-197, 1.025; 328-334, | CK2_PHOSPHO_SITE 257-260; | |
| | | o319-327; | 1.082; 202-214, 1.108; | PKC_PHOSPHO_SITE 64-66; | |
| | | tm328-347; | 161-176, 1.18; 237-261, | CK2_PHOSPHO_SITE 181-184; | |
| | | i348-358; | 1.173; 336-348, 1.222, | ASN_GLYCOSYLATION 157-160; MYRISTYL | |
| | | tm359-381; | 264-290, 1.179; 500-513, | 418-423; MYRISTYL 329-334; MYRISTYL | |
| | | o382-395; | 1.117; 362-384, 1.16; | 14-19; PKC_PHOSPHO_SITE 185-187; | |
| | | tm396-418; | 298-317, 1.213; | | |
| | | i419-419; | | | |
| | | tm420-442; | | | |
| | | o443-451; | | | |
| | | tm452-474; | | | |
| | | i475-570; | | | |
| DEX0450_010.aa.1 | N | 0 - o1-135; | 119-132, 1.08; 82-97, 1.201; | AMIDATION 124-127; CK2_PHOSPHO_SITE | |
| | | | 100-106, 1.044; 68-79, 1.102; | 25-28; CAMP_PHOSPHO_SITE 107-110; | |
| | | | 30-56, 1.184; | MYRISTYL 82-87; PKC_PHOSPHO_SITE 63-65; | |
| | | | | ASN_GLYCOSYLATION 115-118; | |
| DEX0450_010.aa.2 | N | 0 - o1-82; | 67-79, 1.28; 56-65, 1.103; | CK2_PHOSPHO_SITE 7-10; | |
| | | | 21-31, 1.209; 8-19, 1.146; | | |
| | | | 44-54, 1.222; | | |
| DEX0450_010.orf.2 | N | 0 - o1-146; | 69-95, 1.184; 107-118, 1.102; | PKC_PHOSPHO_SITE 102-104; MYRISTYL | |
| | | | 121-136, 1.201; 8-20, 1.101; | 121-126; MYRISTYL 7-12; MYRISTYL 19-24; | |
| | | | 27-39, 1.162; | CK2_PHOSPHO_SITE 64-67; | |
| DEX0450_010.aa.3 | N | 0 - o1-614; | 39-53, 1.134; 343-355, 1.139; | CK2_PHOSPHO_SITE 153-156; | Rhodanese 458-566; RHOD |
| | | | 605-611, 1.097; 432-442, | CK2_PHOSPHO_SITE 389-392; | 455-569; RHODANESE_3 |
| | | | 1.137; 445-450, 1.068; | CAMP_PHOSPHO_SITE 384-387; MYRISTYL | 465-572; MPIPHPHTASE |
| | | | 85-93, 1.063; 130-140, 1.059; | 102-107; ASN_GLYCOSYLATION 53-56; | 588-606; MPIPHPHTASE |
| | | | 401-414, 1.106; 543-558, | CAMP_PHOSPHO_SITE 63-66; | 571-588; MPIPHPHTASE |
| | | | 1.125; 169-183, 1.109; | CK2_PHOSPHO_SITE 142-145; | 431-448; MPIPHPHTASE |
| | | | 300-312, 1.176; 287-292, | PKC_PHOSPHO_SITE 142-144; | 471-491; MPIPHPHTASE |
| | | | 1.051; 357-370, 1.15; | CK2_PHOSPHO_SITE 603-606; MYRISTYL | 513-533; MPIPHPHTASE |
| | | | 316-322, 1.026; 452-460, | 270-275; AMIDATION 61-64; MYRISTYL | 543-564; MPIPHPHTASE |
| | | | 1.094; 17-25, 1.055; | 69-74; CK2_PHOSPHO_SITE 5-8; | 449-469; |
| | | | 223-240, 1.138; 117-124, | PKC_PHOSPHO_SITE 285-287; MYRISTYL | |
| | | | 1.081; 498-524, 1.221; | 98-103; MYRISTYL 267-272; | |
| | | | 154-162, 1.105; 194-219, | PKC_PHOSPHO_SITE 590-592; MYRISTYL | |
| | | | 1.141; 562-574, 1.075; | 71-76; CK2_PHOSPHO_SITE 75-78; | |
| | | | 463-479, 1.176; 486-492, | TYR_PHOSPHO_SITE 442-448; MYRISTYL | |
| | | | 1.099; 101-115, 1.085; | 103-108; CK2_PHOSPHO_SITE 76-79; | |
| | | | 326-335, 1.168; | PKC_PHOSPHO_SITE 603-605; | |
| | | | | CK2_PHOSPHO_SITE 182-185; | |
| | | | | CK2_PHOSPHO_SITE 314-317; | |
| | | | | PKC_PHOSPHO_SITE 525-527; | |
| | | | | CK2_PHOSPHO_SITE 188-191; | |
| | | | | PKC_PHOSPHO_SITE 459-461; | |
| | | | | CK2_PHOSPHO_SITE 239-242; | |
| DEX0450_010.orf.3 | N | 0 - o1-413; | 200-213, 1.106; 361-373, | MYRISTYL 66-71; TYR_PHOSPHO_SITE | MPIPHPHTASE 312-332; |
| | | | 1.075; 142-154, 1.139; | 241-247; PKC_PHOSPHO_SITE 324-326; | MPIPHPHTASE 387-405; |
| | | | 156-169, 1.15; 285-291, | PKC_PHOSPHO_SITE 258-260; | MPIPHPHTASE 370-387; |
| | | | 1.099; 297-323, 1.221; | PKC_PHOSPHO_SITE 389-391; | MPIPHPHTASE 342-363; |
| | | | 99-111, 1.176; 244-249, | PKC_PHOSPHO_SITE 84-86; MYRISTYL 69-74; | MPIPHPHTASE 270-290; |
| | | | 1.068; 404-410, 1.097; | CK2_PHOSPHO_SITE 402-405; | Rhodanese 257-365; |
| | | | 29-39, 1.138; 262-278, 1.176; | CAMP_PHOSPHO_SITE 183-186; | MPIPHPHTASE 230-247; |
| | | | 231-241, 1.137; 86-91.1.051; | CK2_PHOSPHO_SITE 38-41; | MPIPHPHTASE 248-268; |
| | | | 4-19, 1.118; 251-259, 1.094; | CK2_PHOSPHO_SITE 113-116; | RHOD 254-368; |
| | | | 342-357, 1.125; 115-121, | CK2_PHOSPHO_SITE 188-191; | RHODANESE_3 264-371; |
| | | | 1.026; 125-134, 1.168; | PKC_PHOSPHO_SITE 402-404; | |
| DEX0450_011.aa.1 | N | 0 - o1-331; | 5-21, 1.1; 323-328, 1.063; | CAMP_PHOSPHO_SITE 42-45; | PH 5-106; PH 5-104; DEP |
| | | | 193-199, 1.131; 68-75, 1.118; | CK2_PHOSPHO_SITE 284-287; MYRISTYL | 139-225; PH_DOMAIN_2 |
| | | | 215-226, 1.064; 236-257, | 55-60; CK2_PHOSPHO_SITE 78-81; | 247-331; DEP 139-225; |
| | | | 1.142; 267-283, 1.128; | CK2_PHOSPHO_SITE 232-235; | PH_DOMAIN_1 4-104; PH |
| | | | 297-304, 1.121; 25-38, 1.149; | PKC_PHOSPHO_SITE 154-156; MYRISTYL | 248-330; DEP 139-225; |
| | | | 160-168, 1.125; 108-118, | 101-106; CK2_PHOSPHO_SITE 222-225; | |
| | | | 1.147; 311-320, 1.098; | PKC_PHOSPHO_SITE 232-234; | |
| | | | 122-135, 1.132; 175-186, | CK2_PHOSPHO_SITE 88-91; | |
| | | | 1.11; 81-87, 1.12; 49-65, | CK2_PHOSPHO_SITE 240-243; | |
| | | | 1.181; 99-106, 1.048; | PKC_PHOSPHO_SITE 311-313; | |
| | | | | PKC_PHOSPHO_SITE 116-118; MYRISTYL | |
| | | | | 298-303; PKC_PHOSPHO_SITE 226-228; | |
| | | | | CK2_PHOSPHO_SITE 163-166; MYRISTYL | |
| | | | | 202-207; MYRISTYL 308-313; | |
| | | | | PKC_PHOSPHO_SITE 120-122; | |
| | | | | CK2_PHOSPHO_SITE 176-179; | |
| | | | | PKC_PHOSPHO_SITE 295-297; AMIDATION | |
| | | | | 40-43; CAMP_PHOSPHO_SITE 229-232; | |
| | | | | CK2_PHOSPHO_SITE 302-305; | |
| DEX0450_012.aa.1 | N | 0 - o1-176; | 101-112, 1.097; 117-142, | PKC_PHOSPHO_SITE 116-118; MYRISTYL | PROTEASOME_PROTEASE 7-158; |
| | | | 1.156; 48-76, 1.092; 82-98, | 148-153; MYRISTYL 9-14; | PROTEASOME_B 12-59; |
| | | | 1.105; 17-23, 1.144; | CK2_PHOSPHO_SITE 152-155; | proteasome 5-174; |
| | | | | CK2_PHOSPHO_SITE 141-144; | |
| DEX0450_012.aa.2 | N | 0 - o1-158; | 117-142, 1.156; 48-76, 1.092; | CK2_PHOSPHO_SITE 141-144; | PROTEASOME_B 12-59; |
| | | | 17-23, 1.44; 82-98, 1.105; | PKC_PHOSPHO_SITE 116-118; MYRISTYL | PROTEASOME_PROTEASE 7-141; |
| | | | 101-112, 1.097; | 19-14; | proteasome 5-153; |
| DEX0450_013.aa.1 | N | 0 - o1-246; | 47-63, 1.144; 201-224, 1.153; | MYRISTYL 239-244; PKC_PHOSPHO_SITE | Tryp_SPc 20-214; |
| | | | 113-142, 1.174; 4-22, 1.33; | 47-49; PKC_PHOSPHO_SITE 83-85; | trypsin 9-214; |
| | | | 174-189, 1.118; 153-159, | CK2_PHOSPHO_SITE 62-65; MYRISTYL | CHYMOTRYPSIN 164-176; |
| | | | 1.123; 65-107, 1.225; | 202-207; CK2_PHOSPHO_SITE 190-193; | TRYPSIN_SER 165-176; |
| | | | 27-38, 1.2; 165-170, 1.05; | CK2_PHOSPHO_SITE 212-215; MYRISTYL | CHYMOTRYPSIN 66-80; |
| | | | | 41-46; CK2_PHOSPHO_SITE 111-114; | TRYPSIN_DOM 31-219; |
| | | | | PKC_PHOSPHO_SITE 62-64; | |
| DEX0450_014.aa.1 | N | 0 - o1-273; | 25-54, 1.089; 83-94, 1.124; | MYRISTYL 141-146; PKC_PHOSPHO_SITE | PRICHEXTENSN 39-55; |
| | | | 146-156, 1.098; 227-235, | 167-169; MYRISTYL 127-132; | PRICHEXTENSN 72-84; |
| | | | 1.055; 68-75, 1.096; | PKC_PHOSPHO_SITE 56-58; MYRISTYL | PRO_RICH 23-117; |
| | | | 197-208, 1.088; 259-267, | 166-171; MYRISTYL 114-119; | PRICHEXTENSN 171-188; |
| | | | 1.184; 114-125, 1.067; | ASN_GLYCOSYLATION 101-104; | |
| | | | 173-179, 1.088; | PKC_PHOSPHO_SITE 251-253; MYRISTYL | |
| | | | | 244-249; ASN_GLYCOSYLATION 19-22; | |
| | | | | MYRISTYL 213-218; CK2_PHOSPHO_SITE | |
| | | | | 21-24; MYRISTYL 209-214; MYRISTYL | |
| | | | | 11-16; PKC_PHOSPHO_SITE 240-242; | |
| | | | | PKC_PHOSPHO_SITE 15-17; | |
| | | | | CAMP_PHOSPHO_SITE 269-272; MYRISTYL | |
| | | | | 161-166; | |
| DEX0450_014.orf.1 | N | 0 - o1-278; | 178-184, 1.088; 151-161, | MYRISTYL 171-176; MYRISTYL 166-171; | PRICHEXTENSN 176-193; |
| | | | 1.098; 264-272, 1.184; | MYRISTYL 249-254; PKC_PHOSPHO_SITE | PRICHEXTENSN 44-60; |
| | | | 202-213, 1.088; 119-130, | 256-258; PKC_PHOSPHO_SITE 20-22; | PRO_RICH 28-122; |
| | | | 1.067; 88-99, 1.124; 73-80, | MYRISTYL 132_137; ASN_GLYCOSYLATION | PRICHEXTENSN 77-89; |
| | | | 1.096; 4-9, 1.097; 232-240, | 106-109; MYRISTYL 119-124; | |
| | | | 1.055; 30-59, 1.089; | PKC_PHOSPHO_SITE 172-174; | |
| | | | | ASN_GLYCOSYLATION 24-27; MYRISTYL | |
| | | | | 218-223; MYRISTYL 16-21; MYRISTYL | |
| | | | | 146-151; CK2_PHOSPHO_SITE 26-29; | |
| | | | | PKC_PHOSPHO_SITE 61-63; MYRISTYL | |
| | | | | 214-219; CAMP_PHOSPHO_SITE 274-277; | |
| | | | | PKC_PHOSPHO_SITE 245-247; | |
| DEX0450_015.aa.1 | N | 0 - o1-2306; | 105-119, 1.087; 1545-1561, | CK2_PHOSPHO_SITE 1853-1856; MYRISTYL | CPSASE 554-556; MGS |
| | | | 1.111; 1820-1826, | 197-202; PKC_PHOSPHO_SITE 1480-1482; | 1315-1428; Amidohydro_1 |
| | | | 1.106; 995-1002, 1.103; | AMIDATION 1644-1647; | 1462-1695; CPSASE 434-444; |
| | | | 609-616, 1.164; 1181-1198, | CK2_PHOSPHO_SITE 1727-1730; | GATase 179-356; |
| | | | 1.154; 746-765, 1.113; | PKC_PHOSPHO_SITE 166-168; | OTCace 2151-2303; |
| | | | 2079-2085, 1.046; 470-476, | CK2_PHOSPHO_SITE 1772-1775; | CPSase_L_D3 798-921; |
| | | | 1.09; 4-15, 1.104; 346-357, | CK2_PHOSPHO_SITE 2212-2215; | CPSase_L_D2 1047-1268; |
| | | | 1.136; 1296-1303, 1.105; | CK2_PHOSPHO_SITE 2235_2238; | AOTCASE 2050-2069; |
| | | | 545-563, 1.195; 2018-2027, | CK2_PHOSPHO_SITE 1747-1750; | ANTSNTHASEII 332-345; |
| | | | 1.111; 1247-1253, | PKC_PHOSPHO_SITE 1954-1956; MYRISTYL | AOTCASE 2268-2291; |
| | | | 1.094; 1663-1708, | 250-255; PKC_PHOSPHO_SITE 806-808; | CPSase_L_D2 514-745; |
| | | | 1.207; 809-830, 1.186; | CK2_PHOSPHO_SITE 1913-1916; MYRISTYL | CPSGATASE 289-300; |
| | | | 1639-1645, 1.106; 2165-2191, | 2149-2154; CK2_PHOSPHO_SITE 2087-2090; | PRO_RICH 1883-1997; |
| | | | 1.211; 1928-1937, | PKC_PHOSPHO_SITE 1458-1460; | CPSGATASE 264-281; |
| | | | 1.088; 1255-1281, 1.2; | CK2_PHOSPHO_SITE 830-833; | CPSase_L_chain 392-512; |
| | | | 387-407, 1.129; 1389-1395, | TYR_PHOSPHO_SITE 595-602; | AOTCASE 2133-2144; |
| | | | 1.108; 1327-1349, 1.14; | PKC_PHOSPHO_SITE 1863-1865; MYRISTYL | CPSase_L_chain 931-1045; |
| | | | 2135-2142, 1.098; 2089-2125, | 284-289; MYRISTYL 2153-2158; | AOTCASE 2258-2267; |
| | | | 1.236; 855-872, 1.134; | CK2_PHOSPHO_SITE 798-801; | CPSaseII_lrg 388-1440; |
| | | | 1200-1207, 1.085; 156-169, | PKC_PHOSPHO_SITE 1953-1955; | CPSGATASE 214-228; |
| | | | 1.156; 2295-2303, 1.167; | PKC_PHOSPHO_SITE 163-165; | CPSASE_2 1212-1219; |
| | | | 2270-2277, 1.094; 1789-1799, | CK2_PHOSPHO_SITE 1829-1832; | CPSaseIIsmall 2-359; |
| | | | 1.167; 1497-1503, | PKC_PHOSPHO_SITE 1606-1608; | CPSGATASE 247-263; |
| | | | 1.089; 1861-1885; | TYR_PHOSPHO_SITE 1333-1340; MYRISTYL | ANTSNTHASEII 247-258; |
| | | | 1.168; 874-910, 1.171; | 471-476; MYRISTYL 18-23; | CPSASE_1 550-564; |
| | | | 324-340, 1.129; 176-197, | PKC_PHOSPHO_SITE 1331-1333; | GATASE_TYPE_I 247-258; |
| | | | 1.161; 70-76, 1.077; | MICROBODIES_CTER 2304-2306; | DIHYDROOROTASE_2 1765-1776; |
| | | | 1371-1384, 1.085; 1354-1365, | CK2_PHOSPHO_SITE 504-507; MYRISTYL | CARBAMOYLTRANSFERASE |
| | | | 1.132; 1565-1575, | 14-19; CK2_PHOSPHO_SITE 1294-1297; | 2050-2057; CPSASE_1 |
| | | | 1.145; 1313-1320, | MYRISTYL 1550-1555; PKC_PHOSPHO_SITE | 1083-1097; ATCASE 2040-2062; |
| | | | 1.087; 1895-1906, | 1415-1417; ASN_GLYCOSYLATION 1324-1327; | DIHYDROOROTASE_1 |
| | | | 1.129; 415-423, 1.07; | PKC_PHOSPHO_SITE 1396-1398; | 1469-1477; CPSASE_2 |
| | | | 1010-1016, 1.084; 688-721, | ASN_GLYCOSYLATION 141-144; MYRISTYL | 680-687; ATCASE 2078-2087; |
| | | | 1.164; 526-532, 1.078; | 142-147; CK2_PHOSPHO_SITE 761-764; | ATCASE 2262-2267; |
| | | | 245-265, 1.175; 199-212, | MYRISTYL 184-189; MYRISTYL 1658-1663; | OTCace_N 2005-2148; |
| | | | 1.148; 1406-1412, 1.084; | CK2_PHOSPHO_SITE 804-807; | ATCASE 2132-2149; |
| | | | 214-220, 1.07; 1458-1475, | CK2_PHOSPHO_SITE 369-372; MYRISTYL | ATCASE 2223-2232; |
| | | | 1.178; 226-242, 1.154; | 1659-1664; MYRISTYL 1681-1686; | GATASE 247-258; CPSASE |
| | | | 296-312, 1.048; 1760-1772, | CK2_PHOSPHO_SITE 569-572; | 761-779; |
| | | | 1.147; 777-782, 1.049; | CK2_PHOSPHO_SITE 1379-1382; MYRISTYL | CPSase_sm_chain 1-151; |
| | | | 729-743, 1.229; 1955-1960, | 1924-1929; CK2_PHOSPHO_SITE 1805-1808; | CPSASE 623-640; CPSASE |
| | | | 1.056; 629-638, 1.153; | MYRISTYL 1964-1969; | 680-709; ANTSNTHASEII |
| | | | 1828-1836, 1.115; 437-444, | CK2_PHOSPHO_SITE 1480-1483; MYRISTYL | 217-226; GATASE 217-226; |
| | | | 1.065; 1941-1947, 1.028; | 1144-1149; CK2_PHOSPHO_SITE 1037-1040; | GATASE 332-345; |
| | | | 446-463, 1.158; 645-672, | MYRISTYL 1712-1717; | CPSASE 405-419; ATCASE |
| | | | 1.152; 1051-1058, 1.071; | CK2_PHOSPHO_SITE 1360-1363; | 2284-2298; CPSASE 588-607; |
| | | | 2281-2286, 1.047; 2069-2076, | CK2_PHOSPHO_SITE 639-642; | asp_carb_tr 2005-2304; |
| | | | 1.101; 1843-1850, | PKC_PHOSPHO_SITE 285-287; | CPSGATASE 178-192; |
| | | | 1.045; 1509-1537, | PKC_PHOSPHO_SITE 2143-2145; MYRISTYL | |
| | | | 1.146; 1582-1618, | 132-137; PKC_PHOSPHO_SITE 266-268; | |
| | | | 1.229; 1209-1241, 1.18; | PKC_PHOSPHO_SITE 872-874; MYRISTYL | |
| | | | 1108-1130, 1.158; 429-435, | 485-490; PKC_PHOSPHO_SITE 2189-2191; | |
| | | | 1.072; 1157-1171, 1.092; | ASN_GLYCOSYLATION 1560-1563; | |
| | | | 2239-2251, 1.126; 33-60, | MYRISTYL 477-482; CK2_PHOSPHO_SITE | |
| | | | 1.181; 481-505, 1.141; | 356-359; MYRISTYL 625-630; MYRISTYL | |
| | | | 2060-2066, 1.046; 79-98, | 1010-1015; MYRISTYL 1017-1022; | |
| | | | 1.233; 17-31, 1.094; | MYRISTYL 2070-2075; CK2_PHOSPHO_SITE | |
| | | | 1134-1155, 1.18; 376-384, | 344-347; PKC_PHOSPHO_SITE 2195-2197; | |
| | | | 1.126; 1074-1095, 1.237; | MYRISTYL 724-729; MYRISTYL 767-772; | |
| | | | 1988-2013, 1.188; 1488-1495, | CK2_PHOSPHO_SITE 1069-1072; | |
| | | | 1.049; 1968-1980, | PKC_PHOSPHO_SITE 2181-2183; | |
| | | | 1.173; 601-607, 1.093; | PKC_PHOSPHO_SITE 44-46; MYRISTYL | |
| | | | 2219-2226, 1.084; 131-141, | 1095-1100; MYRISTYL 895-900; | |
| | | | 1.136; 574-593, 1.155; | MYRISTYL 610-615; MYRISTYL 1546-1551; | |
| | | | 2195-2203, 1.124; 1026-1038, | CAMP_PHOSPHO_SITE 1403-1406; | |
| | | | 1.117; 1419-1456, 1.19; | ASN_GLYCOSYLATION 1394-1397; | |
| | | | 843-852, 1.129; 1620-1635, | MYRISTYL 564-569; CK2_PHOSPHO_SITE | |
| | | | 1.267; 676-686, 1.125; | 771-774; CK2_PHOSPHO_SITE 1103-1106; | |
| | | | 931-962, 1.192; 1710-1729; | CK2_PHOSPHO_SITE 1284-1287; | |
| | | | 1.179; 2038-2045, | CK2_PHOSPHO_SITE 2074-2077; | |
| | | | 1.055; 277-292, 1.178; | PKC_PHOSPHO_SITE 369-371; MYRISTYL | |
| | | | 785-797, 1.112; 2259-2267, | 1320-1325; CK2_PHOSPHO_SITE 981-984; | |
| | | | 1.093; 146-152, 1.106; | MYRISTYL 562-567; AMIDATION 1401-1404; | |
| | | | 1806-1816, 1.121; 914-921, | CK2_PHOSPHO_SITE 947-950; | |
| | | | 1.112; | PKC_PHOSPHO_SITE 1175-1177; MYRISTYL | |
| | | | | 80-85; MYRISTYL 1543-1548; MYRISTYL | |
| | | | | 1488-1493; CK2_PHOSPHO_SITE 924-927; | |
| | | | | PKC_PHOSPHO_SITE 752-754; MYRISTYL | |
| | | | | 1356-1361; PKC_PHOSPHO_SITE 1321-1323; | |
| | | | | PKC_PHOSPHO_SITE 375-377; | |
| | | | | MYRISTYL 322-327; CK2_PHOSPHO_SITE | |
| | | | | 1562-1565; PKC_PHOSPHO_SITE 2054-2056; | |
| | | | | PKC_PHOSPHO_SITE 125-127; | |
| | | | | PKC_PHOSPHO_SITE 1073-1075; | |
| | | | | TYR_PHOSPHO_SITE 2286-2293; MYRISTYL | |
| | | | | 1159-1164; PKC_PHOSPHO_SITE 929-931; | |
| | | | | MYRISTYL 216-221; PKC_PHOSPHO_SITE | |
| | | | | 793-795; CK2_PHOSPHO_SITE 2205-2208; | |
| | | | | CK2_PHOSPHO_SITE 23-26; | |
| | | | | PKC_PHOSPHO_SITE 569-571; | |
| | | | | PKC_PHOSPHO_SITE 2027-2029; MYRISTYL | |
| | | | | 363-368; PKC_PHOSPHO_SITE 593-595; | |
| | | | | PKC_PHOSPHO_SITE 356-358; | |
| | | | | CK2_PHOSPHO_SITE 103-106; MYRISTYL | |
| | | | | 318-323; CK2_PHOSPHO_SITE 2143-2146; | |
| | | | | MYRISTYL 1279-1284; MYRISTYL 1251-1256; | |
| | | | | MYRISTYL 561-566; MYRISTYL | |
| | | | | 403-408; | |
| DEX0450_015.orf.1 | N | 0 - o1-1651; | 793-805, 1.112; 78-84, 1.077; | ASN_GLYCOSYLATION 1402-1405; | CPSASE 596-615; |
| | | | 1018-1024, 1.084; 384-392, | PKC_PHOSPHO_SITE 760-762; MYRISTYL | CPSGATASE 272-289; |
| | | | 1.126; 534-540, 1.078; | 192-197; PKC_PHOSPHO_SITE 364-366; | GATASE 255-266; |
| | | | 1628-1643, 1.267; 164-177, | ASN_GLYCOSYLATION 1568-1571; | CPSase_L_D3 806-929; |
| | | | 1.156; 617-624, 1.164; | CK2_PHOSPHO_SITE 1488-1491; MYRISTYL | CPSASE 769-787; CPSASE |
| | | | 1321-1328, 1.087; 1255-1261, | 618-623; MYRISTYL 572-577; | 442-452; GATASE_TYPE_I |
| | | | 1.094; 922-929, 1.112; | PKC_PHOSPHO_SITE 801-803; MYRISTYL | 255-266; GATASE 225-234; |
| | | | 4-23, 1.129; 1263-1289, 1.2; | 26-31; CK2_PHOSPHO_SITE 1387-1390; | MGS 1323-1436; |
| | | | 437-443, 1.072; 851-860, | PKC_PHOSPHO_SITE 880-882; | GATase 187-364; GATASE |
| | | | 1.129; 737-751, 1.229; | CK2_PHOSPHO_SITE 512-515; | 340-353; CPSase_L_chain |
| | | | 817-838, 1.186; 1590-1626, | CK2_PHOSPHO_SITE 1570-1573; MYRISTYL | 400-520; CPSASE_1 1091-1105; |
| | | | 1.229; 882-918, 1.171; | 1496-1501; MYRISTYL 150-155; | 1105; CPSASE_1 558-572; |
| | | | 1496-1503, 1.049; 684-694, | MYRISTYL 371-376; MYRISTYL 292-297; | CPSASE 562-574; |
| | | | 1.125; 395-415, 1.129; | MYRISTYL 330-335; MYRISTYL 633-638; | DIHYDROOROTASE_1 1477-1485; |
| | | | 454-471, 1.158; 184-205, | CK2_PHOSPHO_SITE 352-355; MYRISTYL | CPSASE 688-717; |
| | | | 1.161; 304-320, 1.048; | 140-145; ASN_GLYCOSYLATION 149-152; | CPSASE 631-648; |
| | | | 785-790, 1.049; 207-220, | MYRISTYL 485-490; MYRISTYL 1558-1563; | ANTSNTHASEII 225-234; |
| | | | 1.148; 87-106, 1.233; | MYRISTYL 1554-1559; | CPSaseIIsmall 10-367; |
| | | | 253-273, 1.175; 609-615, | PKC_PHOSPHO_SITE 293-295; | CPSase_L_D2 1055-1276; |
| | | | 1.093; 754-773, 1.113; | CK2_PHOSPHO_SITE 1045-1048; MYRISTYL | CPSaseII_lrg 396-1448; |
| | | | 696-729, 1.164; 1573-1583, | 1551-1556; MYRISTYL 569-574; | CPSase_L_chain 939-1053; |
| | | | 1.145; 1116-1138, | CK2_PHOSPHO_SITE 989-992; MYRISTYL | CPSase_L_D2 522-753; |
| | | | 1.158; 1034-1046, | 88-93; ASN_GLYCOSYLATION 1332-1335; | ANTSNTHASEII 340-353; |
| | | | 1.117; 234-250, 1.154; | MYRISTYL 493-498; MYRISTYL 1025-1030; | CPSASE 2 1220-1227; |
| | | | 637-646, 1.153; 139-149, | MYRISTYL 22-27; | CPSase_sm_chain |
| | | | 1.136; 582-601, 1.155; | PKC_PHOSPHO_SITE 171-173; | 8-159; ANTSNTHASEII |
| | | | 553-571, 1.195; 332-348, | PKC_PHOSPHO_SITE 174-176; | 255-266; CPSASE_2 688-695; |
| | | | 1.129; 1362-1373, 1.132; | PKC_PHOSPHO_SITE 52-54; | CPSGATASE 222-236; |
| | | | 653-680, 1.152; 1189-1206, | TYR_PHOSPHO_SITE 603-610; | CPSGATASE 255-271; |
| | | | 1.154; 354-365, 1.136; | TYR_PHOSPHO_SITE 1341-1348; | CPSGATASE 186-200; |
| | | | 1059-1066, 1.071; 1427-1464, | CK2_PHOSPHO_SITE 955-958; | CPSGATASE 297-308; |
| | | | 1.19; 1517-1545, 1.146; | PKC_PHOSPHO_SITE 274-276; | CPSASE 413-427; |
| | | | 863-880, 1.134; 1466-1483, | CK2_PHOSPHO_SITE 1302-1305; | |
| | | | 1.178; 1397-1403, | PKC_PHOSPHO_SITE 133-135; | |
| | | | 1.108; 939-970, 1.192; | CK2_PHOSPHO_SITE 1292-1295; | |
| | | | 25-39, 1.094; 1553-1569, | CK2_PHOSPHO_SITE 1111-1114; | |
| | | | 1.111; 1379-1392, | CK2_PHOSPHO_SITE 932-935; | |
| | | | 1.085; 285-300, 1.178; | CK2_PHOSPHO_SITE 31-34; | |
| | | | 1082-1103, 1.237; 41-68, | PKC_PHOSPHO_SITE 937-939; | |
| | | | 1.181; 1208-1215, 1.085; | PKC_PHOSPHO_SITE 1614-1616; | |
| | | | 1003-1010, 1.103; 489-513, | PKC_PHOSPHO_SITE 1423-1425; | |
| | | | 1.141; 113-127, 1.087; | CK2_PHOSPHO_SITE 1077-1080; MYRISTYL | |
| | | | 478-484, 1.09; 1304-1311, | 1259-1264; PKC_PHOSPHO_SITE 1329-1331; | |
| | | | 1.105; 445-452, 1.065; | MYRISTYL 1287-1292; MYRISTYL | |
| | | | 154-160, 1.106; 1414-1420, | 1328-1333; MYRISTYL 479-484; | |
| | | | 1.084; 1165-1179, | PKC_PHOSPHO_SITE 1183-1185; MYRISTYL | |
| | | | 1.092; 222-228, 1.07; | 1167-1172; CK2_PHOSPHO_SITE 806-809; | |
| | | | 423-431, 1.07; 1142-1163, | PKC_PHOSPHO_SITE 1081-1083; | |
| | | | 1.18; 1335-1357, 1.14; | PKC_PHOSPHO_SITE 1488-1490; | |
| | | | 1505-1511, 1.089; 1217-1249, | CK2_PHOSPHO_SITE 111-114; | |
| | | | 1.18; | CK2_PHOSPHO_SITE 779-782; AMIDATION | |
| | | | | 1409-1412; CK2_PHOSPHO_SITE 377-380; | |
| | | | | CAMP_PHOSPHO_SITE 1411-1414; | |
| | | | | MYRISTYL 258-263; CK2_PHOSPHO_SITE | |
| | | | | 1368-1371; PKC_PHOSPHO_SITE 1404-1406; | |
| | | | | MYRISTYL 205-210; | |
| | | | | PKC_PHOSPHO_SITE 1466-1468; | |
| | | | | PKC_PHOSPHO_SITE 383-385; MYRISTYL | |
| | | | | 732-737; MYRISTYL 224-229; | |
| | | | | CK2_PHOSPHO_SITE 577-580; | |
| | | | | PKC_PHOSPHO_SITE 377-379; | |
| | | | | CK2_PHOSPHO_SITE 364-367; | |
| | | | | CK2_PHOSPHO_SITE 812-815; | |
| | | | | PKC_PHOSPHO_SITE 1339-1341; MYRISTYL | |
| | | | | 411-416; CK2_PHOSPHO_SITE 838-841; | |
| | | | | PKC_PHOSPHO_SITE 577-579; MYRISTYL | |
| | | | | 775-780; CK2_PHOSPHO_SITE 647-650; | |
| | | | | MYRISTYL 1103-1108; MYRISTYL 1018-1023; | |
| | | | | PKC_PHOSPHO_SITE 814-816; | |
| | | | | CK2_PHOSPHO_SITE 769-772; MYRISTYL | |
| | | | | 1152-1157; MYRISTYL 1364-1369; | |
| | | | | MYRISTYL 570-575; PKC_PHOSPHO_SITE | |
| | | | | 601-603; MYRISTYL 903-908; MYRISTYL | |
| | | | | 326-331; | |
| DEX0450_015.aa.2 | N | 0 - o1-2242; | 1209-1241, 1.18; 1679-1691, | CK2_PHOSPHO_SITE 798-801; | DIHYDROOROTASE_1 1469-1477; |
| | | | 1.147; 1181-1198, | CK2_PHOSPHO_SITE 830-833; MYRISTYL | ATCASE 2220-2234; |
| | | | 1.154; 437-444, 1.065; | 1543-1548; MICROBODIES_CTER 2240-2242; | GATASE_TYPE_I 247-258; |
| | | | 33-60, 1.181; 574-593, 1.155; | MYRISTYL 1488-1493; | ATCASE 2198-2203; |
| | | | 2131-2139, 1.124; 245-265, | CK2_PHOSPHO_SITE 924-927; | CPSase_L_chain 931-1045; |
| | | | 1.175; 809-830, 1.186; | PKC_PHOSPHO_SITE 1480-1482; | ANTSNTHASEII 247-258; |
| | | | 70-76, 1.077; 199-212, 1.148; | PKC_PHOSPHO_SITE 163-165; | CPSASE_1 550-564; |
| | | | 1974-1981, 1.055; 2071-2078, | CK2_PHOSPHO_SITE 639-642; MYRISTYL | CPSASE 554-566; CPSASE |
| | | | 1.098; 645-672, 1.152; | 2089-2094; CK2_PHOSPHO_SITE 569-572; | 434-444; CPSASE 623-640; |
| | | | 629-638, 1.153; 1134-1155, | PKC_PHOSPHO_SITE 266-268; | CPSase_L_D2 1047-1268; |
| | | | 1.18; 214-220, 1.07; | CK2_PHOSPHO_SITE 1832-1835; MYRISTYL | CPSase_L_D2 514-745; |
| | | | 481-505, 1.141; 1780-1804, | 284-289; CK2_PHOSPHO_SITE 369-372; | AOTCASE 1986-2005; |
| | | | 1.168; 1725-1735, | MYRISTYL 1356-1361; CK2_PHOSPHO_SITE | CPSASE 588-607; AOTCASE |
| | | | 1.121; 874-910, 1.171; | 771-774; MYRISTYL 2085-2090; | 2204-2227; AOTCASE |
| | | | 1565-1575, 1.145; 156-169, | PKC_PHOSPHO_SITE 166-168; | 2194-2203; AOTCASE |
| | | | 1.156; 446-463, 1.158; | CK2_PHOSPHO_SITE 1772-1775; | 2069-2080; GATase 179-356; |
| | | | 526-532, 1.078; 1904-1916, | CK2_PHOSPHO_SITE 761-764; | CPSase_L_chain |
| | | | 1.173; 1488-1495, | PKC_PHOSPHO_SITE 1990-1992; | 392-512; MGS 1315-1428; |
| | | | 1.049; 470-476, 1.09; | AMIDATION 1401-1404; | CARBAMOYLTRANSFERASE |
| | | | 688-721, 1.164; 429-435, | CK2_PHOSPHO_SITE 2010-2013; | 1986-1993; Amidohydro_1 |
| | | | 1.072; 1010-1016, 1.084; | PKC_PHOSPHO_SITE 1458-1460; | 1462-1694; |
| | | | 176-197, 1.161; 1924-1949, | PKC_PHOSPHO_SITE 1963-1965; | DIHYDROOROTASE_2 1684-1695; |
| | | | 1.188; 2217-2222, | CK2_PHOSPHO_SITE 2023-2026; | GATASE 217-226; |
| | | | 1.047; 2005-2012, | PKC_PHOSPHO_SITE 2079-2081; | CPSase_L_D3 798-921; |
| | | | 1.101; 676-686, 1.125; | CK2_PHOSPHO_SITE 1562-1565; MYRISTYL | GATASE 247-258; CPSASE |
| | | | 415-423, 1.07; 1074-1095, | 1900-1905; CK2_PHOSPHO_SITE 1480-1483; | 680-709; |
| | | | 1.237; 2231-2239, | MYRISTYL 322-327; MYRISTYL | CPSase_sm_chain 1-151; |
| | | | 1.167; 1762-1769, | 363-368; CK2_PHOSPHO_SITE 1379-1382; | OTCace 2087-2239; |
| | | | 1.045; 1051-1058, | PKC_PHOSPHO_SITE 369-371; | OTCace_N 1941-2084; |
| | | | 1.071; 1996-2002, | CK2_PHOSPHO_SITE 2079-2082; MYRISTYL | CPSASE 761-779; |
| | | | 1.046; 324-340, 1.129; | 1144-1149; ASN_GLYCOSYLATION 1394-1397; | CPSGATASE 247-263; |
| | | | 1847-1856, 1.088; 1509-1537, | MYRISTYL 318-323; | CPSASE 405-419; |
| | | | 1.146; 1814-1825, | CK2_PHOSPHO_SITE 1748-1751; | CPSASE_2 1212-1219; |
| | | | 1.129; 1497-1503, | PKC_PHOSPHO_SITE 375-377; MYRISTYL | ATCASE 2068-2085; |
| | | | 1.089; 79-98, 1.233; | 1320-1325; CK2_PHOSPHO_SITE 1666-1669; | ANTSNTHASEII 217-226; |
| | | | 226-242, 1.154; 105-119, | MYRISTYL 197-202; MYRISTYL | ANTSNTHASEII 332-345; |
| | | | 1.087; 1891-1896, 1.056; | 1251-1256; CK2_PHOSPHO_SITE 804-807; | CPSGATASE 264-281; |
| | | | 1708-1718, 1.167; 2025-2061, | MYRISTYL 1159-1164; CK2_PHOSPHO_SITE | ATCASE 2159-2168; |
| | | | 1.236; 777-782, 1.049; | 1646-1649; CK2_PHOSPHO_SITE 1037-1040; | CPSASE_1 1083-1097; |
| | | | 1860-1871, 1.139; 1354-1365, | MYRISTYL 1279-1284; | CPSGATASE 178-192; |
| | | | 1.132; 131-141, 1.136; | CK2_PHOSPHO_SITE 2171-2174; MYRISTYL | CPSaseIIsmall 2-359; |
| | | | 1026-1038, 1.117; 4-15, | 184-189; CK2_PHOSPHO_SITE 2148-2151; | CPSGATASE 214-228; |
| | | | 1.104; 1255-1281, 1.2; | MYRISTYL 1095-1100; MYRISTYL 216-221; | GATASE 332-345; ATCASE |
| | | | 2155-2162, 1.084; 914-921, | CK2_PHOSPHO_SITE 947-950; | 1976-1998; asp_carb_tr |
| | | | 1.112; 1327-1349, 1.14; | CK2_PHOSPHO_SITE 2141-2144; | 1941-2240; CPSaseII_lrg |
| | | | 746-765, 1.113; 387-407, | CK2_PHOSPHO_SITE 981-984; MYRISTYL | 388-1440; ATCASE 2014-2023; |
| | | | 1.129; 1371-1384, 1.085; | 1010-1015; TYR_PHOSPHO_SITE 595-602; | CPSGATASE 289-300; |
| | | | 1739-1745, 1.106; 1200-1207, | MYRISTYL 250-255; ASN_GLYCOSYLATION | CPSASE_2 680-687; |
| | | | 1.085; 729-743, 1.229; | 1560-1563; MYRISTYL 1017-1022; | pyrC_multi 1425-1797; |
| | | | 346-357, 1.136; 855-872, | MYRISTYL 767-772; PKC_PHOSPHO_SITE | |
| | | | 1.134; 545-563, 1.195; | 872-874; MYRISTYL 471-476; MYRISTYL | |
| | | | 2015-2021, 1.046; 1313-1320, | 561-566; PKC_PHOSPHO_SITE 793-795; | |
| | | | 1.087; 785-797, 1.112; | TYR_PHOSPHO_SITE 1333-1340; | |
| | | | 296-312, 1.048; 1545-1561, | CK2_PHOSPHO_SITE 1069-1072; | |
| | | | 1.111; 1296-1303, | PKC_PHOSPHO_SITE 1175-1177; | |
| | | | 1.105; 2101-2127, | CK2_PHOSPHO_SITE 1294-1297; MYRISTYL | |
| | | | 1.211; 1389-1395, | 724-729; MYRISTYL 477-482; MYRISTYL | |
| | | | 1.108; 376-384, 1.126; | 18-23; MYRISTYL 403-408; | |
| | | | 1747-1755, 1.115; 843-852, | ASN_GLYCOSYLATION 1324-1327; | |
| | | | 1.129; 1247-1253, 1.094; | MYRISTYL 80-85; MYRISTYL 14-19; | |
| | | | 1629-1648, 1.179; 1582-1618, | ASN_GLYCOSYLATION 141-144; MYRISTYL | |
| | | | 1.229; 1406-1412, | 895-900; CK2_PHOSPHO_SITE 23-26; | |
| | | | 1.084; 2175-2187, | MYRISTYL 485-490; PKC_PHOSPHO_SITE | |
| | | | 1.126; 1954-1963, | 752-754; PKC_PHOSPHO_SITE 806-808; | |
| | | | 1.111; 1157-1171, | PKC_PHOSPHO_SITE 356-358; MYRISTYL | |
| | | | 1.092; 1108-1130, | 1873-1878; PKC_PHOSPHO_SITE 2131-2133; | |
| | | | 1.158; 609-616, 1.164; | TYR_PHOSPHO_SITE 2222-2229; | |
| | | | 1620-1627, 1.123; 17-31, | PKC_PHOSPHO_SITE 2117-2119; | |
| | | | 1.094; 931-962, 1.192; | PKC_PHOSPHO_SITE 2125-2127; MYRISTYL | |
| | | | 1458-1475, 1.178; 995-1002, | 625-630; CK2_PHOSPHO_SITE 1691-1694; | |
| | | | 1.103; 2206-2213, | MYRISTYL 564-569; CK2_PHOSPHO_SITE | |
| | | | 1.094; 146-152, 1.106; | 1724-1727; PKC_PHOSPHO_SITE 44-46; | |
| | | | 277-292, 1.178; 601-607, | PKC_PHOSPHO_SITE 593-595; MYRISTYL | |
| | | | 1.093; 1419-1456, 1.19; | 562-567; PKC_PHOSPHO_SITE 569-571; | |
| | | | 2195-2203, 1.093; | CK2_PHOSPHO_SITE 1284-1287; MYRISTYL | |
| | | | | 2006-2011; CK2_PHOSPHO_SITE 1103-1106; | |
| | | | | CK2_PHOSPHO_SITE 1360-1363; | |
| | | | | CAMP_PHOSPHO_SITE 1403-1406; | |
| | | | | CK2_PHOSPHO_SITE 103-106; MYRISTYL | |
| | | | | 610-615; CK2_PHOSPHO_SITE 356-359; | |
| | | | | PKC_PHOSPHO_SITE 1782-1784; | |
| | | | | PKC_PHOSPHO_SITE 1606-1608; | |
| | | | | PKC_PHOSPHO_SITE 1415-1417; MYRISTYL | |
| | | | | 1550-1555; PKC_PHOSPHO_SITE 1321-1323; | |
| | | | | PKC_PHOSPHO_SITE 1890-1892; | |
| | | | | MYRISTYL 1843-1848; MYRISTYL 1631-1636; | |
| | | | | PKC_PHOSPHO_SITE 929-931; | |
| | | | | CK2_PHOSPHO_SITE 344-347; | |
| | | | | PKC_PHOSPHO_SITE 1396-1398; MYRISTYL | |
| | | | | 132-137; MYRISTYL 142-147; MYRISTYL | |
| | | | | 1546-1551; CK2_PHOSPHO_SITE 504-507; | |
| | | | | PKC_PHOSPHO_SITE 125-127; | |
| | | | | PKC_PHOSPHO_SITE 1889-1891; | |
| | | | | PKC_PHOSPHO_SITE 1331-1333; | |
| | | | | PKC_PHOSPHO_SITE 285-287; | |
| | | | | PKC_PHOSPHO_SITE 1073-1075; | |
| DEX0450_015.aa.3 | N | 0 - o1-371; | 134-141, 1.101; 125-131, | PKC_PHOSPHO_SITE 254-256; | ATCASE 105-127; AOTCASE |
| | | | 1.046; 53-78, 1.188, | CK2_PHOSPHO_SITE 300-303; MYRISTYL | 333-356; |
| | | | 346-351, 1.047; 144-150, | 218-223; MYRISTYL 29-34; | CARBAMOYLTRANSFERASE |
| | | | 1.046; 230-256, 1.211; | PCK_PHOSPHO_SITE 18-20; | 115-122; ATCASE 143-152; |
| | | | 154-190, 1.236; 33-45, 1.173; | PKC_PHOSPHO_SITE 19-21; | ATCASE 349-363; |
| | | | 335-342, 1.094; 360-368, | CK2_PHOSPHO_SITE 270-273; | ATCASE 327-332; OTCASE |
| | | | 1.167; 20-25, 1.056; 4-11, | CK2_PHOSPHO_SITE 208-211; | 347-358; AOTCASE 323-332; |
| | | | 1.239; 103-110, 1.055; | PKC_PHOSPHO_SITE 246-248; MYRISTYL | OTCASE 113-127; |
| | | | 324-332, 1.093; 260-268; | 135-140; MYRISTYL 214-219; | ATCASE 197-214; AOTCASE |
| | | | 1.124; 304-316, 1.126; | PKC_PHOSPHO_SITE 208-210; | 198-209; AOTCASE 115-134; |
| | | | 284-291, 1.084; 83-92, 1.111; | PKC_PHOSPHO_SITE 92-94; | OTCASE 146-159; |
| | | | 200-207, 1.098; | CK2_PHOSPHO_SITE 152-155; | OTCace 216-368; ATCASE |
| | | | | MICROBODIES_CTER 369-371; | 288-297; OTCace_N 70-213; |
| | | | | TYR_PHOSPHO_SITE 351-358; | asp_carb_tr 70-369; |
| | | | | CK2_PHOSPHO_SITE 139-142; | |
| | | | | PKC_PHOSPHO_SITE 260-262; | |
| | | | | PKC_PHOSPHO_SITE 119-121; | |
| | | | | CK2_PHOSPHO_SITE 277-280; | |
| DEX0450_016.aa.1 | N | 0 - o1-970; | 83-104, 1.166; 449-555, | MYRISTYL 40-45; CK2_PHOSPHO_SITE 25-28; | HLH_2 766-822; |
| | | | 1.169; 265-270, 1.091; | CAMP_PHOSPHO_SITE 729-732; | PRICHEXTENSN 449-470; |
| | | | 590-600, 1.164; 742-757, | CAMP_PHOSPHO_SITE 190-193; MYRISTYL | PRO_RICH 374-671; HLH |
| | | | 1.14; 348-358, 1.081; | 194-199; CK2_PHOSPHO_SITE 27-30; | 773-827; HLH 768-822; |
| | | | 329-339, 1.103; 412-421, | CK2_PHOSPHO_SITE 235-238; | PRICHEXTENSN 378-394; |
| | | | 1.054; 814-822, 1.096; | PKC_PHOSPHO_SITE 33-35; MYRISTYL | PRICHEXTENSN 470-486; |
| | | | 202-210, 1.06; 4-20, 1.147; | 902-907; LEUCINE_ZIPPER 821-842; | PRICHEXTENSN 506-531; |
| | | | 219-234, 1.083; 424-446, | CAMP_PHOSPHO_SITE 768-771; | HLH_1 806-821; |
| | | | 1.104; 905-940, 1.173; | CK2_PHOSPHO_SITE 261-264; | |
| | | | 623-671, 1.144; 160-167, | CAMP_PHOSPHO_SITE 258-261; | |
| | | | 1.132; 174-180, 1.083; | PKC_PHOSPHO_SITE 672-674; MYRISTYL | |
| | | | 280-297, 1.246; 305-320, | 7-12; PKC_PHOSPHO_SITE 762-764; | |
| | | | 1.128; 570-581, 1.068; | CK2_PHOSPHO_SITE 23-26; | |
| | | | 111-119, 1.128; 602-619, | CK2_PHOSPHO_SITE 725-728; | |
| | | | 1.152; 711-725, 1.166; | ASN_GLYCOSYLATION 763-766; | |
| | | | 885-898, 1.133; 39-61, 1.134; | CK2_PHOSPHO_SITE 672-675; | |
| | | | 239-255, 1.136; 402-409, | PKC_PHOSPHO_SITE 497-499; | |
| | | | 1.095; 845-863, 1.146; | CK2_PHOSPHO_SITE 625-628; | |
| | | | 184-191, 1.084; 943-948, | PKC_PHOSPHO_SITE 936-938; AMIDATION | |
| | | | 1.023; 128-151, 1.174; | 687-690; PKC_PHOSPHO_SITE 103-105; | |
| | | | 385-399, 1.15; 790-810, | PKC_PHOSPHO_SITE 98-100; MYRISTYL | |
| | | | 1.126; | 715-720; PKC_PHOSPHO_SITE 802-804; | |
| | | | | PKC_PHOSPHO_SITE 564-566; | |
| | | | | CAMP_PHOSPHO_SITE 137-140; | |
| | | | | CK2_PHOSPHO_SITE 357-360; MYRISTYL | |
| | | | | 3-8; MYRISTYL 792-797; | |
| | | | | PKC_PHOSPHO_SITE 745-747; | |
| | | | | PKC_PHOSPHO_SITE 911-913; MYRISTYL | |
| | | | | 857-862; PKC_PHOSPHO_SITE 727-729; | |
| | | | | MYRISTYL 695-700; CK2_PHOSPHO_SITE | |
| | | | | 621-624; CAMP_PHOSPHO_SITE 693-696; | |
| | | | | MYRISTYL 941-946; | |
| DEX0450_016.orf.1 | Y | 0 - o1-719; | 347-357, 1.103; 641-689, | CK2_PHOSPHO_SITE 253-256; MYRISTYL | PRICHEXTENSN 396-412; |
| | | | 1.144; 430-439, 1.054; | 25-30; PKC_PHOSPHO_SITE 51-53; | PRICHEXTENSN 488-504; |
| | | | 323-338, 1.128; 57-79, 1.134; | CAMP_PHOSPHO_SITE 711-714; | PRICHEXTENSN 467-488; |
| | | | 202-209, 1.084; 237-252, | CK2_PHOSPHO_SITE 43-46; | PRO_RICH 392-689; |
| | | | 1.083; 101-122, 1.166; | CK2_PHOSPHO_SITE 643-646; MYRISTYL | PRICHEXTENSN 524-549; |
| | | | 298-315, 1.246; 257-273, | CK2_PHOSPHO_SITE 279-282; | |
| | | | 1.136; 129-137, 1.128; | PKC_PHOSPHO_SITE 116-118; | |
| | | | 467-573, 1.169; 20-38, 1.147; | CK2_PHOSPHO_SITE 41-44; | |
| | | | 146-169, 1.174; 403-417, | PKC_PHOSPHO_SITE 582-584; | |
| | | | 1.15; 620-637, 1.152; | PKC_PHOSPHO_SITE 515-517; | |
| | | | 420-427, 1.095; 178-185, | PKC_PHOSPHO_SITE 121-123; | |
| | | | 1.132; 10-17, 1.087; | CK2_PHOSPHO_SITE 45-48; | |
| | | | 220-228, 1.06; 283-288, | CAMP_PHOSPHO_SITE 208-211; MYRISTYL | |
| | | | 1.091; 588-599, 1.068; | 21-26; MYRISTYL 58-63; | |
| | | | 608-618, 1.164; 366-376, | CAMP_PHOSPHO_SITE 276-279; | |
| | | | 1.081; 192-198, 1.083; | CK2_PHOSPHO_SITE 639-642; MYRISTYL | |
| | | | 442-464, 1.104; | 713-718; CK2_PHOSPHO_SITE 375-378; | |
| | | | | PKC_PHOSPHO_SITE 690-692; | |
| | | | | CK2_PHOSPHO_SITE 690-693; | |
| | | | | CAMP_PHOSPHO_SITE 155-158; AMIDATION | |
| | | | | 705-708; | |
| DEX0450_016.aa.2 | N | 0 - o1-629; | 504-522, 1.146; 261-278, | LEUCINE_ZIPPER 480-501; | PRICHEXTENSN 165-190; |
| | | | 1.152; 449-469, 1.126; | PKC_PHOSPHO_SITE 595-597; | PRICHEXTENSN 112-128; |
| | | | 602-607, 1.023; 473-481, | PKC_PHOSPHO_SITE 19-21; | HLH_2 425-481; |
| | | | 1.096; 249-259, 1.164; | PKC_PHOSPHO_SITE 331-333; MYRISTYL | PRICHEXTENSN 33-45; |
| | | | 108-214, 1.169; 282-330, | 600-605; CAMP_PHOSPHO_SITE 388-391; | PRICHEXTENSN 132-149; |
| | | | 1.144; 544-557, 1.133; | PKC_PHOSPHO_SITE 386-388; | PRO_RICH 33-330; HLH_1 |
| | | | 71-80, 1.054; 13-20, 1.057; | CK2_PHOSPHO_SITE 280-283; | 465-480; HLH 427-481; |
| | | | 61-68, 1.095; 44-58, 1.15; | CAMP_PHOSPHO_SITE 352-355; MYRISTYL | HLH 432-486; |
| | | | 229-240, 1.068; 564-599, | 561-566; MYRISTYL 516-521; | |
| | | | 1.173; 401-416, 1.14; | ASN_GLYCOSYLATION 422-425; | |
| | | | 370-384, 1.166; 83-105, | PKC_PHOSPHO_SITE 404-406; AMIDATION | |
| | | | 1.104; | 346-349; PKC_PHOSPHO_SITE 421-423; | |
| | | | | PKC_PHOSPHO_SITE 461-463; | |
| | | | | CAMP_PHOSPHO_SITE 427-430; | |
| | | | | PKC_PHOSPHO_SITE 570-572; MYRISTYL | |
| | | | | 12-17; PKC_PHOSPHO_SITE 223-225; | |
| | | | | CK2_PHOSPHO_SITE 331-334; MYRISTYL | |
| | | | | 451-456; CK2_PHOSPHO_SITE 284-287; | |
| | | | | CK2_PHOSPHO_SITE 384-387; | |
| | | | | PKC_PHOSPHO_SITE 156-158; MYRISTYL | |
| | | | | 374-379; MYRISTYL 354-359; | |
| DEX0450_016.orf.2 | N | 0 - o1-382; | 66-80, 1.15; 105-127, 1.104; | PKC_PHOSPHO_SITE 178-180; MYRISTYL | PRICHEXTENSN 146-171; |
| | | | 304-352, 1.144; 93-102, | 11-16; MYRISTYL 376-381; | PRICHEXTENSN 54-71; |
| | | | 1.054; 271-281, 1.164; | PKC_PHOSPHO_SITE 41-43; | CARBMTKINASE 77-92; |
| | | | 35-42, 1.057; 283-300, 1.152; | PKC_PHOSPHO_SITE 353-355; | PRO_RICH 55-352; |
| | | | 83-90, 1.095; 251-262, 1.068; | CK2_PHOSPHO_SITE 306-309; AMIDATION | CARBMTKINASE 3-21; |
| | | | 16-29, 1.151; 130-236, 1.169; | 368-371; CK2_PHOSPHO_SITE 353-356; | |
| | | | 4-11, 1.133; | MYRISTYL 34-39; MYRISTYL 14-19; | |
| | | | | MYRISTYL 15-20; CAMP_PHOSPHO_SITE | |
| | | | | 374-377; CK2_PHOSPHO_SITE 302-305; | |
| | | | | MYRISTYL 18-23; PKC_PHOSPHO_SITE | |
| | | | | 245-247; | |
| DEX0450_016.aa.3 | N | 0 - o1-1009; | 781-796, 1.14; 641-658, | CK2_PHOSPHO_SITE 300-303; | HLH 812-866; HLH 807-861; |
| | | | 1.152; 174-180, 1.083; | PKC_PHOSPHO_SITE 784-786; | PRO_RICH 413-710; |
| | | | 184-191, 1.084; 629-639, | CK2_PHOSPHO_SITE 664-667; | HLH_2 805-861; HLH_1 |
| | | | 1.164; 488-594, 1.169; | PKC_PHOSPHO_SITE 801-803; MYRISTYL | 845-860; PRICHEXTENSN |
| | | | 368-378, 1.103; 451-460, | 194-199; MYRISTYL 734-739; | 509-525; PRICHEXTENSN |
| | | | 1.054; 853-861, 1.096; | CAMP_PHOSPHO_SITE 190-193; MYRISTYL | 417-433; PRICHEXTENSN |
| | | | 424-438, 1.15; 344-359, | 896-901; MYRISTYL 754-759; | 545-570; PRICHEXTENSN |
| | | | 1.128; 128-151, 1.174; | CAMP_PHOSPHO_SITE 297-300; MYRISTYL | 488-509; |
| | | | 982-987, 1.023; 944-979, | 831-836; CK2_PHOSPHO_SITE 27-30; | |
| | | | 1.173; 83-104, 1.166; | LEUCINE_ZIPPER 860-881; | |
| | | | 609-620, 1.068; 662-710, | CK2_PHOSPHO_SITE 711-714; MYRISTYL | |
| | | | 1.144; 319-336, 1.246; | 941-946; CAMP_PHOSPHO_SITE 807-810; | |
| | | | 219-234, 1.083; 111-119, | PKC_PHOSPHO_SITE 33-35; | |
| | | | 1.128; 39-61, 1.134; | PKC_PHOSPHO_SITE 841-843; MYRISTYL | |
| | | | 387-397, 1.081; 924-937, | 282-287; CK2_PHOSPHO_SITE 660-663; | |
| | | | 1.133; 239-263, 1.136; | PKC_PHOSPHO_SITE 603-605; | |
| | | | 202-210, 1.06; 160-167, | PKC_PHOSPHO_SITE 950-952; MYRISTYL | |
| | | | 1.132; 441-448, 1.095; | 287-292; PKC_PHOSPHO_SITE 536-538; | |
| | | | 285-298, 1.244; 829-849, | ASN_GLYCOSYLATION 802-805; | |
| | | | 1.126; 265-271, 1.099; | CK2_PHOSPHO_SITE 23-26; MYRISTYL | |
| | | | 463-485, 1.104; 304-309, | 980-985; MYRISTYL 3-8; | |
| | | | 1.091; 884-902, 1.146; | PKC_PHOSPHO_SITE 103-105; | |
| | | | 750-764, 1.166; 4-20, 1.147; | CK2_PHOSPHO_SITE 235-238; | |
| | | | | CK2_PHOSPHO_SITE 25-28; MYRISTYL 7-12; | |
| | | | | PKC_PHOSPHO_SITE 98-100; | |
| | | | | CAMP_PHOSPHO_SITE 768-771; | |
| | | | | CK2_PHOSPHO_SITE 764-767; | |
| | | | | PKC_PHOSPHO_SITE 975-977; | |
| | | | | PKC_PHOSPHO_SITE 766-768; RGD 271-273; | |
| | | | | CK2_PHOSPHO_SITE 270-273; | |
| | | | | MYRISTYL 40-45; PKC_PHOSPHO_SITE | |
| | | | | 711-713; CAMP_PHOSPHO_SITE 137-140; | |
| | | | | CAMP_PHOSPHO_SITE 732-735; | |
| | | | | CK2_PHOSPHO_SITE 396-399; AMIDATION | |
| | | | | 726-729; | |
| DEX0450_016.orf.3 | N | 0 - o1-469; | 391-439, 1.144; 73-88, 1.128; | CK2_PHOSPHO_SITE 125-128; AMIDATION | PRICHEXTENSN 269-294; |
| | | | 338-349, 1.068; 192-214, | 455-458; CAMP_PHOSPHO_SITE 461-464; | PRICHEXTENSN 221-237; |
| | | | 1.104; 180-189, 1.054; | PKC_PHOSPHO_SITE 440-442; MYRISTYL | PRICHEXTENSN 142-154; |
| | | | 153-167, 1.15; 170-177, | 463-468; PKC_PHOSPHO_SITE 332-334; | PRICHEXTENSN 241-258; |
| | | | 1.095; 48-65, 1.246; | PKC_PHOSPHO_SITE 265-267; | PRO_RICH 142-439; |
| | | | 358-368, 1.164; 217-323, | CK2_PHOSPHO_SITE 29-32; | |
| | | | 1.169; 33-38, 1.091; 16-27, | CK2_PHOSPHO_SITE 393-396; | |
| | | | 1.244; 116-126, 1.081; | CK2_PHOSPHO_SITE 440-443; MYRISTYL | |
| | | | 370-387, 1.152; 97-107, | 16-21; CAMP_PHOSPHO_SITE 26-29; | |
| | | | 1.103; | CK2_PHOSPHO_SITE 389-392; | |
| DEX0450_017.aa.1 | N | 0 - o1-191; | 4-25, 1.16; 100-122, 1.125; | MYRISTYL 35-40; PKC_PHOSPHO_SITE 81-83; | PRICHEXTENSN 64-85; |
| | | | 146-158, 1.049; 83-95, 1.18; | MYRISTYL 167-172; | PRICHEXTENSN 15-27; |
| | | | 67-73, 1.11; | ASN_GLYCOSYLATION 79-82; MYRISTYL | |
| | | | | 164-169; MYRISTYL 78-83; | |
| DEX0450_017.aa.2 | N | 0 - o1-117; | 49-84, 1.09; 104-114, 1.087; | MYRISTYL 42-47; MYRISTYL 93-98; | GLY_RICH 2-51; |
| | | | | MYRISTYL 22-27; MYRISTYL 32-37; | |
| | | | | MYRISTYL 90-95; MYRISTYL 2-7; | |
| | | | | MYRISTYL 12-17; MYRISTYL 50-55; | |
| DEX0450_017.orf.2 | N | 0 - o1-165; | 157-162, 1.028; 84-101, | MYRISTYL 67-72; PKC_PHOSPHO_SITE 27-29; | ATP_GTP_A 23-30; |
| | | | 1.106; 112-135, 1.165; | CK2_PHOSPHO_SITE 45-48; | |
| | | | 43-82, 1.208; 103-109, 1.036; | AMIDATION 148-151; CK2_PHOSPHO_SITE | |
| | | | | 7-10; | |
| DEX0450_017.aa.3 | N | 0 - o1-146; | 113-121, 1.125; 49-84, 1.09; | MYRISTYL 22-27; MYRISTYL 108-113; | GLY_RICH 2-51; |
| | | | | MYRISTYL 90-95; MYRISTYL 93-98; | |
| | | | | MYRISTYL 32-37; MYRISTYL 42-47; | |
| | | | | MYRISTYL 106-111; MYRISTYL 12-17; | |
| | | | | MYRISTYL 50-55; MYRISTYL 2-7; | |
| DEX0450_017.orf.3 | N | 0 - o1-165; | 103-109, 1.036; 43-82, 1.208; | CK2_PHOSPHO_SITE 7-10; | ATP_GTP_A 23-30; |
| | | | 157-162, 1.028; 112-135, | PKC_PHOSPHO_SITE 27-29; AMIDATION | |
| | | | 1.165; 84-101, 1.106; | 148-151; CK2_PHOSPHO_SITE 45-48; | |
| | | | | MYRISTYL 67-72; | |
| DEX0450_018.aa.1 | Y | 0 - o1-636; | 384-400, 1.124; 151-157, | PKC_PHOSPHO_SITE 496-498; | sp_O60568_PLO3_HUMAN |
| | | | 1.056; 192-203, 1.102; | CK2_PHOSPHO_SITE 121-124; MYRISTYL | 516-596; |
| | | | 501-509, 1.105; 226-233, | 254-259; CK2_PHOSPHO_SITE 496-499; | |
| | | | 1.15; 63-69, 1.064; 597-620, | CK2_PHOSPHO_SITE 367-370; | |
| | | | 1.201; 478-484, 1.077; | ASN_GLYCOSYLATION 63-66; | |
| | | | 36-47, 1.199; 170-183, 1.099; | CK2_PHOSPHO_SITE 483-486; | |
| | | | 512-519, 1.074; 491-497, | PKC_PHOSPHO_SITE 518-520; | |
| | | | 1.068; 8-23, 1.223; 240-254, | PKC_PHOSPHO_SITE 402-404; | |
| | | | 1.178; 338-363, 1.159; | PKC_PHOSPHO_SITE 471-473; | |
| | | | 523-533, 1.076; 376-382, | CK2_PHOSPHO_SITE 23-26; MYRISTYL 77-82; | |
| | | | 1.07; 444-469, 1.135; | MYRISTYL 628-633; AMIDATION 159-162; | |
| | | | 624-630, 1.038; 295-336, | PKC_PHOSPHO_SITE 159-161; | |
| | | | 1.235; 577-584, 1.097; | TYR_PHOSPHO_SITE 57-64; RGD 468-470; | |
| | | | 259-268, 1.096; 52-59, 1.073; | TYR_PHOSPHO_SITE 380-388; MYRISTYL | |
| | | | 108-147, 1.127; 412-419, | 588-593; ASN_GLYCOSYLATION 548-551; | |
| | | | 1.107; 559-575, 1.156; | PKC_PHOSPHO_SITE 633-635; MYRISTYL | |
| | | | | 167-172; CK2_PHOSPHO_SITE 487-490; | |
| | | | | CK2_PHOSPHO_SITE 485-488; | |
| | | | | CK2_PHOSPHO_SITE 433-436; | |
| | | | | PKC_PHOSPHO_SITE 25-27; MYRISTYL | |
| | | | | 278-283; PKC_PHOSPHO_SITE 65-67; | |
| | | | | CK2_PHOSPHO_SITE 519-522; | |
| DEX0450_018.aa.2 | Y | 0 - o1-682; | 295-336, 1.235; 8-23, 1.223; | ASN_GLYCOSYLATION 624-627; MYRISTYL | sp_O60568_PLO3_HUMAN |
| | | | 523-533, 1.076; 226-233, | 278-283; CK2_PHOSPHO_SITE 519-522; | 516-612; |
| | | | 1.15; 512-519, 1.074; | MYRISTYL 254-259; CK2_PHOSPHO_SITE | |
| | | | 491-497, 1.068; 638-645, | 487-490; MYRISTYL 625-630; RGD 468-470; | |
| | | | 1.074; 478-484, 1.077; | CK2_PHOSPHO_SITE 433-436; | |
| | | | 338-363, 1.159; 376-382, | CK2_PHOSPHO_SITE 367-370; | |
| | | | 1.07; 259-268, 1.096; | PKC_PHOSPHO_SITE 25-27; | |
| | | | 649-666, 1.151; 612-618, | CK2_PHOSPHO_SITE 485-488; | |
| | | | 1.086; 501-509, 1.105; | ASN_GLYCOSYLATION 548-551; | |
| | | | 52-59, 1.073; 151-157, 1.056; | ASN_GLYCOSYLATION 63-66; | |
| | | | 412-419, 1.107; 36-47, 1.199; | PKC_PHOSPHO_SITE 471-473; | |
| | | | 384-400, 1.124; 192-203, | PKC_PHOSPHO_SITE 518-520; | |
| | | | 1.102; 444-469, 1.135; | PKC_PHOSPHO_SITE 65-67; | |
| | | | 577-584, 1.097; 559-575, | TYR_PHOSPHO_SITE 57-64; | |
| | | | 1.156; 170-183, 1.099; | CK2_PHOSPHO_SITE 121-124; | |
| | | | 63-69, 1.064; 240-254, 1.178; | CK2_PHOSPHO_SITE 23-26; MYRISTYL 77-82; | |
| | | | 108-147, 1.127; | AMIDATION 159-162; | |
| | | | | CK2_PHOSPHO_SITE 483-486; MYRISTYL | |
| | | | | 632-637; PKC_PHOSPHO_SITE 496-498; | |
| | | | | PKC_PHOSPHO_SITE 159-161; | |
| | | | | TYR_PHOSPHO_SITE 380-388; MYRISTYL | |
| | | | | 167-172; MYRISTYL 588-593; | |
| | | | | CK2_PHOSPHO_SITE 496-499; | |
| | | | | PKC_PHOSPHO_SITE 402-404; | |
| DEX0450_018.aa.3 | Y | 0 - o1-654; | 412-419, 1.107; 611-617, | TYR_PHOSPHO_SITE 57-64; | sp_O60568_PLO3_HUMAN |
| | | | 1.107; 108-147, 1.127; | PKC_PHOSPHO_SITE 402-404; | 516-596; |
| | | | 170-183, 1.099; 444-469, | PKC_PHOSPHO_SITE 518-520; | |
| | | | 1.135; 338-363, 1.159; | CK2_PHOSPHO_SITE 485-488; | |
| | | | 192-203, 1.102; 63-69, 1.064; | PKC_PHOSPHO_SITE 496-498; | |
| | | | 501-509, 1.105; 226-233, | TYR_PHOSPHO_SITE 380-388; | |
| | | | 1.15; 523-533, 1.076; | CK2_PHOSPHO_SITE 483-486; RGD 468-470; | |
| | | | 240-254, 1.178; 478-484, | CK2_PHOSPHO_SITE 487-490; | |
| | | | 1.077; 512-519, 1.074; | PKC_PHOSPHO_SITE 471-473; | |
| | | | 151-157, 1.056; 8-23, 1.223; | ASN_GLYCOSYLATION 548-551; AMIDATION | |
| | | | 376-382, 1.07; 295-336, | 159-162; CK2_PHOSPHO_SITE 617-620; | |
| | | | 1.235; 491-497, 1.068; | CK2_PHOSPHO_SITE 519-522; | |
| | | | 36-47, 1.199; 559-575, 1.156; | PKC_PHOSPHO_SITE 648-650; | |
| | | | 52-59, 1.073; 577-584, 1.097; | CK2_PHOSPHO_SITE 23-26; | |
| | | | 384-400, 1.124; 259-268, | CK2_PHOSPHO_SITE 496-499; | |
| | | | 1.096; | CK2_PHOSPHO_SITE 121-124; | |
| | | | | PKC_PHOSPHO_SITE 25-27; MYRISTYL | |
| | | | | 167-172; MYRISTYL 612-617; | |
| | | | | CK2_PHOSPHO_SITE 433-436; MYRISTYL | |
| | | | | 647-652; MYRISTYL 77-82; | |
| | | | | ASN_GLYCOSYLATION 63-66; MYRISTYL | |
| | | | | 599-604; CK2_PHOSPHO_SITE 367-370; | |
| | | | | MYRISTYL 254-259; PKC_PHOSPHO_SITE | |
| | | | | 159-161; MYRISTYL 278-283; MYRISTYL | |
| | | | | 588-593; PKC_PHOSPHO_SITE 65-67; | |
| DEX0450_018.orf.3 | Y | 0 - o1-669; | | PKC_PHOSPHO_SITE 533-535; MYRISTYL | sp_O60568_PLO3_HUMAN |
| | | | | 603-608; CK2_PHOSPHO_SITE 632-635; | 531-611; |
| | | | | ASN_GLYCOSYLATION 563-566; | |
| | | | | PKC_PHOSPHO_SITE 511-513; | |
| | | | | TYR_PHOSPHO_SITE 395-403; MYRISTYL | |
| | | | | 92-97; AMIDATION 174-177; | |
| | | | | CK2_PHOSPHO_SITE 500-503; | |
| | | | | CK2_PHOSPHO_SITE 382-385; | |
| | | | | PKC_PHOSPHO_SITE 417-419; MYRISTYL | |
| | | | | 613-618; RGD 483-485; | |
| | | | | ASN_GLYCOSYLATION 78-81; | |
| | | | | TYR_PHOSPHO_SITE 72-79; | |
| | | | | CK2_PHOSPHO_SITE 448-451; | |
| | | | | CK2_PHOSPHO_SITE 38-41; MYRISTYL | |
| | | | | 182-187; MYRISTYL 614-619; | |
| | | | | PKC_PHOSPHO_SITE 174-176; | |
| | | | | CK2_PHOSPHO_SITE 498-501; | |
| | | | | ASN_GLYCOSYLATION 613-616; | |
| | | | | CK2_PHOSPHO_SITE 136-139; MYRISTYL | |
| | | | | 627-632; PKC_PHOSPHO_SITE 80-82; | |
| | | | | MYRISTYL 269-274; PKC_PHOSPHO_SITE | |
| | | | | 40-42; PKC_PHOSPHO_SITE 486-488; | |
| | | | | MYRISTYL 293-298; CK2_PHOSPHO_SITE | |
| | | | | 502-505; CK2_PHOSPHO_SITE 534-537; | |
| | | | | PKC_PHOSPHO_SITE 663-665; | |
| | | | | CK2_PHOSPHO_SITE 511-514; MYRISTYL | |
| | | | | 662-667; | |
| DEX0450_018.aa.4 | N | 0 - o1-411; | 279-293, 1.123; 140-150, | CK2_PHOSPHO_SITE 17-20; MYRISTYL | sp_060568_PLO3_HUMAN |
| | | | 1.076; 364-375, 1.157; | 199-204; CK2_PHOSPHO_SITE 18-21; | 133-155; 20G-FeII_Oxy |
| | | | 403-408, 1.144; 129-136, | PKC_PHOSPHO_SITE 336-338; MYRISTYL | 320-411; |
| | | | 1.074; 152-159, 1.102; | 41-46; PKC_PHOSPHO_SITE 84-86; | LYS_HYDROXYLASE 339-346; |
| | | | 336-343, 1.068; 347-355, | CAMP_PHOSPHO_SITE 15-18; | P4Hc 237-410; |
| | | | 1.103; 167-172, 1.063; | CK2_PHOSPHO_SITE 75-78; MYRISTYL | sp_O60568_PLO3_HUMAN |
| | | | 79-92, 1.068; 178-184, 1.106; | 394-399; MYRISTYL 37-42; MYRISTYL | 212-411; |
| | | | 295-306, 1.12; 250-257, | 275-280; CK2_PHOSPHO_SITE 84-87; RGD | |
| | | | 1.097; 116-126, 1.105; | 56-58; CK2_PHOSPHO_SITE 175-178; | |
| | | | 203-210, 1.1; 66-72, 1.077; | PKC_PHOSPHO_SITE 135-137; | |
| | | | 309-316, 1.08; 43-57, 1.135; | PKC_PHOSPHO_SITE 175-177; | |
| | | | 4-10, 1.103; 232-248, 1.156; | CK2_PHOSPHO_SITE 407-410; | |
| | | | 380-394, 1.095; 322-330, | PKC_PHOSPHO_SITE 187-189; MYRISTYL | |
| | | | 1.129; 96-111, 1.09; 26-33, | 35-40; CK2_PHOSPHO_SITE 136-139; | |
| | | | 1.097; | MYRISTYL 92-97; PKC_PHOSPHO_SITE 17-19; | |
| | | | | CK2_PHOSPHO_SITE 73-76; | |
| | | | | AMIDATION 13-16; MYRISTYL 166-171; | |
| | | | | CK2_PHOSPHO_SITE 71-74; | |
| | | | | PKC_PHOSPHO_SITE 375-377; | |
| | | | | ASN_GLYCOSYLATION 221-224; | |
| | | | | PKC_PHOSPHO_SITE 59-61; MYRISTYL | |
| | | | | 261-266; | |
| DEX0450_018.orf.4 | N | 0 - o1-255; | 153-160, 1.08; 123-137, | CK2_PHOSPHO_SITE 19-22; | 2OG-FeII_Oxy 164-255; |
| | | | 1.123; 180-187, 1.068; | PKC_PHOSPHO_SITE 31-33; MYRISTYL | P4Hc 81-254; |
| | | | 94-101, 1.097; 76-92, 1.156; | 105-110; PKC_PHOSPHO_SITE 180-182; | LYS_HYDROXYLASE 183-190; |
| | | | 22-28, 1.106; 191-199, 1.103; | MYRISTYL 10-15; PKC_PHOSPHO_SITE 3-5; | sp_O60568_PLO3_HUMAN |
| | | | 139-150, 1.12; 47-54, 1.1; | MYRISTYL 119-124; | 56-255; |
| | | | 208-219, 1.157; 247-252, | ASN_GLYCOSYLATION 65-68; MYRISTYL | |
| | | | 1.144; 166-174, 1.129; | 43-48; MYRISTYL 238-243; | |
| | | | 11-16, 1.063; 224-238, 1.095; | CK2_PHOSPHO_SITE 251-254; | |
| | | | | PKC_PHOSPHO_SITE 19-21; | |
| | | | | PKC_PHOSPHO_SITE 219-221; | |
| DEX0450_019.aa.1 | N | 0 - o1-312; | 282-291, 1.119; 249-258, | AMIDATION 259-262; MYRISTYL 79-84; | PROTEASOME 44-59; |
| | | | 1.043; 37-55, 1.146; 83-104, | MYRISTYL 11-16; AMIDATION 191-194; | PROTEASOME 201-212; |
| | | | 1.142; 58-79, 1.128; | MYRISTYL 159-164; MYRISTYL 243-248; | PROTEASOME_B 40-87; |
| | | | 225-240, 1.194; 110-119, | ASN_GLYCOSYLATION 211-214; MYRISTYL | PROTEASOME 165-176; |
| | | | 1.102; 206-213, 1.1; | 165-170; PKC_PHOSPHO_SITE 274-276; | proteasome 33-215; |
| | | | 145-152, 1.111; 261-274, | MYRISTYL 59-64; ASN_GLYCOSYLATION | PROTEASOME_PROTEASE 35-200; |
| | | | 1.217; 194-200, 1.074; | 303-306; MYRISTYL 173-178; MYRISTYL | PROTEASOME 176-187; |
| | | | | 47-52; PKC_PHOSPHO_SITE 200-202; | |
| | | | | CK2_PHOSPHO_SITE 184-187; MYRISTYL | |
| | | | | 167-172; MYRISTYL 128-133; | |
| | | | | TYR_PHOSPHO_SITE 69-76; MYRISTYL | |
| | | | | 134-139; MYRISTYL 130-135; MYRISTYL | |
| | | | | 207-212; MYRISTYL 154-159; | |
| | | | | CK2_PHOSPHO_SITE 200-203; | |
| DEX0450_019.orf.1 | N | 0 - o1-299; | 35-41, 1.09; 135-156, 1.128; | CK2_PHOSPHO_SITE 261-264; AMIDATION | PROTEASOME_PROTEASE |
| | | | 160-181, 1.142; 114-132, | 65-68; PKC_PHOSPHO_SITE 277-279; | 112-277; PROTEASOME |
| | | | 1.146; 12-31, 1.157; | MYRISTYL 244-249; MYRISTYL 242-247; | 121-136; PROTEASOME_B |
| | | | 271-277, 1.074; 222-229, | MYRISTYL 156-161; AMIDATION 268-271; | 117-164; PROTEASOME |
| | | | 1.111; 283-290, 1.1; 57-64, | MYRISTYL 43-48; MYRISTYL 40-45; | 242-253; proteasome |
| | | | 1.102; 187-196, 1.102; | MYRISTYL 250-255; MYRISTYL 211-216; | 110-292; PROTEASOME |
| | | | | PKC_PHOSPHO_SITE 65-67; | 278-289; PROTEASOME |
| | | | | ASN_GLYCOSYLATION 288-291; | 253-264; |
| | | | | TYR_PHOSPHO_SITE 146-153; MYRISTYL | |
| | | | | 136-141; MYRISTYL 124-129; | |
| | | | | TYR_PHOSPHO_SITE 67-74; | |
| | | | | PKC_PHOSPHO_SITE 4-6; MYRISTYL 231-236; | |
| | | | | PKC_PHOSPHO_SITE 50-52; | |
| | | | | CK2_PHOSPHO_SITE 277-280; MYRISTYL | |
| | | | | 236-241; MYRISTYL 207-212; MYRISTYL | |
| | | | | 205-210; MYRISTYL 88-93; | |
| | | | | PKC_PHOSPHO_SITE 77-79; MYRISTYL | |
| | | | | 284-289; | |
| DEX0450_019.aa.2 | N | 0 - o1-274; | 206-212, 1.1; 110-119, 1.102; | MYRISTYL 154-159; PKC_PHOSPHO_SITE | PROTEASOME 44-59; |
| | | | 58-79, 1.128; 194-200, 1.074; | 219-221; MYRISTYL 11-16; AMIDATION | PROTEASOME 165-176; |
| | | | 83-104, 1.142; 37-55, 1.146; | 191-194; MYRISTYL 165-170; MYRISTYL | PROTEASOME_PROTEASE 35-200; |
| | | | 145-152, 1.111; 253-259, | 159-164; PKC_PHOSPHO_SITE 248-250; | PROTEASOME 176-187; |
| | | | 1.097; | MYRISTYL 134-139; CAMP_PHOSPHO_SITE | PROTEASOME 201-212; |
| | | | | 249-252; MYRISTYL 173-178; MYRISTYL | PROTEASOME_B 40-87; |
| | | | | 47-52; CK2_PHOSPHO_SITE 200-203; | proteasome 33-215; |
| | | | | MYRISTYL 128-133; MYRISTYL 79-84; | |
| | | | | MYRISTYL 207-212; MYRISTYL 59-64; | |
| | | | | MYRISTYL 254-259; MYRISTYL 167-172; | |
| | | | | TYR_PHOSPHO_SITE 69-76; | |
| | | | | CK2_PHOSPHO_SITE 184-187; | |
| | | | | PKC_PHOSPHO_SITE 200-202; MYRISTYL | |
| | | | | 130-135; | |
| DEX0450_019.orf.2 | N | 0 - o1-294; | 222-229, 1.111; 114-132, | CK2_PHOSPHO_SITE 261-264; AMIDATION | proteasome 110-292; |
| | | | 1.146; 283-289, 1.1; | 268-271; TYR_PHOSPHO_SITE 146-153; | PROTEASOME 242-253; |
| | | | 160-181, 1.142; 135-156, | MYRISTYL 284-289; MYRISTYL 231-236; | PROTEASOME 253-264; |
| | | | 1.128; 271-277, 1.074; | PKC_PHOSPHO_SITE 77-79; | PROTEASOME 278-289; |
| | | | 12-31, 1.157; 187-196, 1.102; | PKC_PHOSPHO_SITE 65-67; MYRISTYL | PROTEASOME 121-136; |
| | | | 35-41, 1.09; 57-64, 1.102; | 136-141; MYRISTYL 43-48; MYRISTYL | PROTEASOME_PROTEASE |
| | | | | 211-216; PKC_PHOSPHO_SITE 4-6; | 112-277; PROTEASOME_B |
| | | | | AMIDATION 65-68; MYRISTYL 250-255; | 117-164; |
| | | | | MYRISTYL 88-93; MYRISTYL 236-241; | |
| | | | | MYRISTYL 40-45; PKC_PHOSPHO_SITE | |
| | | | | 277-279; MYRISTYL 124-129; | |
| | | | | TYR_PHOSPHO_SITE 67-74; MYRISTYL | |
| | | | | 207-212; MYRISTYL 244-249; MYRISTYL | |
| | | | | 156-161; PKC_PHOSPHO_SITE 50-52; | |
| | | | | MYRISTYL 242-247; MYRISTYL 205-210; | |
| | | | | CK2_PHOSPHO_SITE 277-280; | |
| DEX0450_019.aa.3 | N | 0 - o1-237; | 58-79, 1.128; 222-233, 1.175; | MYRISTYL 59-64; MYRISTYL 130-135; | proteasome 33-215; |
| | | | 37-55, 1.146; 83-104, 1.142; | MYRISTYL 167-172; MYRISTYL 11-16; | PROTEASOME 201-212; |
| | | | 194-200, 1.074; 206-213, | CK2_PHOSPHO_SITE 200-203; MYRISTYL | PROTEASOME 176-187; |
| | | | 1.112; 145-152, 1.111; | 154-159; PKC_PHOSPHO_SITE 200-202; | PROTEASOME_B 40-87; |
| | | | 110-119, 1.102; | MYRISTYL 159-164; MYRISTYL 165-170; | PROTEASOME 165-176; |
| | | | | CK2_PHOSPHO_SITE 223-226; MYRISTYL | PROTEASOME_PROTEASE 35-200; |
| | | | | 79-84; MYRISTYL 47-52; | PROTEASOME 44-59; |
| | | | | CK2_PHOSPHO_SITE 184-187; MYRISTYL | |
| | | | | 134-139; AMIDATION 191-194; MYRISTYL | |
| | | | | 128-133; MYRISTYL 173-178; | |
| | | | | TYR_PHOSPHO_SITE 69-76; MYRISTYL | |
| | | | | 207-212; | |
| DEX0450_019.orf.3 | N | 0 - o1-297; | | TYR_PHOSPHO_SITE 67-74; MYRISTYL | PROTEASOME_PROTEASE |
| | | | | 236-241; MYRISTYL 250-255; | 112-277; proteasome |
| | | | | TYR_PHOSPHO_SITE 146-153; MYRISTYL | 110-292; PROTEASOME |
| | | | | 207-212; CK2_PHOSPHO_SITE 277-280; | 253-264; PROTEASOME |
| | | | | AMIDATION 268-271; MYRISTYL 211-216; | 121-136; PROTEASOME |
| | | | | PKC_PHOSPHO_SITE 50-52; AMIDATION 65-68; MYRISTYL | 242-253; PROTEASOME |
| | | | | 156-161; MYRISTYL | 278-289; PROTEASOME_B |
| | | | | 40-45; PKC_PHOSPHO_SITE 277-279; | 117-164; |
| | | | | PKC_PHOSPHO_SITE 4-6; MYRISTYL 88-93; | |
| | | | | MYRISTYL 284-289; | |
| | | | | PKC_PHOSPHO_SITE 77-79; MYRISTYL | |
| | | | | 231-236; MYRISTYL 244-249; MYRISTYL 124-129; MYRISTYL | |
| | | | | 136-141; | |
| | | | | PKC_PHOSPHO_SITE 65-67; MYRISTYL | |
| | | | | 205-210; MYRISTYL 43-48; | |
| | | | | CK2_PHOSPHO_SITE 261-264; MYRISTYL | |
| | | | | 242-247; | |
| DEX0450_020.aa.1 | N | 0 - o1-260; | 198-213, 1.076; 128-145, | PKC_PHOSPHO_SITE 75-77; | |
| | | | 1.093; 53-71, 1.181; | CK2_PHOSPHO_SITE 16-19; | |
| | | | 238-254, 1.196; 151-161, | CK2_PHOSPHO_SITE 256-259; | |
| | | | 1.056; 40-50, 1.103; | LEUCINE_ZIPPER 55-76; | |
| | | | 223-233, 1.092; 97-104, | PKC_PHOSPHO_SITE 161-163; MYRISTYL | |
| | | | 1.099; 163-174, 1.09; 5-16, | 157-162; CK2_PHOSPHO_SITE 51-54; | |
| | | | 1.088; 20-38, 1.144; | MYRISTYL 160-165; LEUCINE_ZIPPER 48-69; | |
| | | | | MYRISTYL 85-90; MYRISTYL 119-124; | |
| DEX0450_020.orf.1 | N | 0 - o1-249; | 29-39, 1.103; 117-134, 1.093; | MYRISTYL 146-151; CK2_PHOSPHO_SITE | |
| | | | 4-27, 1.144; 212-222, 1.092; | 40-43; PKC_PHOSPHO_SITE 150-152; | |
| | | | 152-163, 1.09; 86-93, 1.099; | MYRISTYL 108-113; MYRISTYL 74-79; | |
| | | | 140-150, 1.056; 42-60, 1.181; | LEUCINE_ZIPPER 37-58; | |
| | | | 187-202, 1.076; 227-243, | PKC_PHOSPHO_SITE 64-66; | |
| | | | 1.196; | LEUCINE_ZIPPER 44-65; MYRISTYL 149-154; | |
| | | | | CK2_PHOSPHO_SITE 245-248; | |
| DEX0450_020.aa.2 | Y | 0 - o1-132; | 4-12, 1.075; 41-71, 1.185; | MYRISTYL 31-36; CK2_PHOSPHO_SITE | |
| | | | 15-27, 1.203; 31-37, 1.04; | 101-104; PKC_PHOSPHO_SITE 117-119; | |
| | | | 75-119, 1.163; | ASN_GLYCOSYLATION 122-125; MYRISTYL | |
| | | | | 71-76; | |
| DEX0450_020.orf.2 | N | 0 - o1-225; | | MYRISTYL 108-113; TYR_PHOSPHO_SITE | |
| | | | | 15-23; AMIDATION 13-16; | |
| | | | | CK2_PHOSPHO_SITE 4-7; | |
| | | | | PKC_PHOSPHO_SITE 105-107; MYRISTYL | |
| | | | | 112-117; CK2_PHOSPHO_SITE 119-122; | |
| | | | | MYRISTYL 43-48; PKC_PHOSPHO_SITE 13-15; | |
| | | | | PKC_PHOSPHO_SITE 23-25; | |
| | | | | CK2_PHOSPHO_SITE 91-94; MYRISTYL 44-49; | |
| | | | | MYRISTYL 149-154; MYRISTYL 10-15; | |
| | | | | CK2_PHOSPHO_SITE 69-72; MYRISTYL | |
| | | | | 153-158; | |
| DEX0450_020.orf.3 | N | 0 - o1-451; | 145-150, 1.066; 152-159, | MYRISTYL 239-244; PKC_PHOSPHO_SITE | PRICHEXTENSN 150-171; |
| | | | 1.121; 105-111, 1.059; | 135-137; CK2_PHOSPHO_SITE 201-204; | PRICHEXTENSN 47-59; |
| | | | 325-335, 1.245; 410-419, | LEUCINE_ZIPPER 401-422; | GLN_RICH 383-421; |
| | | | 1.079; 248-254, 1.06; 4-46, | PKC_PHOSPHO_SITE 256-258; | SER_RICH 192-310; |
| | | | 1.165; 261-272, 1.059; | CK2_PHOSPHO_SITE 220-223; | PRICHEXTENSN 311-323; |
| | | | 182-189, 1.057; 390-402, | PKC_PHOSPHO_SITE 224-226; MYRISTYL | |
| | | | 1.179; 192-201, 1.027; | 69-74; MYRISTYL 188-193; | |
| | | | 74-93, 1.186; 423-429, 1.048; | PKC_PHOSPHO_SITE 38-40; MYRISTYL | |
| | | | 317-322, 1.064; 307-314, | 296-301; MYRISTYL 178-183; | |
| | | | 1.056; 120-137, 1.13; | PKC_PHOSPHO_SITE 277-279; | |
| | | | 203-211, 1.047; 294-300, | CK2_PHOSPHO_SITE 310-313; | |
| | | | 1.081; 162-168, 1.08; | PKC_PHOSPHO_SITE 282-284; MYRISTYL | |
| | | | 213-219, 1.076; 229-235, | 295-300; MYRISTYL 175-180; | |
| | | | 1.094; 377-385, 1.072; | LEUCINE_ZIPPER 408-429; | |
| | | | 344-349, 1.045; | CK2_PHOSPHO_SITE 350-353; MYRISTYL | |
| | | | | 215-220; MYRISTYL 290-295; MYRISTYL | |
| | | | | 31-36; MYRISTYL 287-292; | |
| | | | | CK2_PHOSPHO_SITE 273-276; | |
| | | | | CK2_PHOSPHO_SITE 109-112; MYRISTYL | |
| | | | | 65-70; MYRISTYL 255-260; | |
| | | | | LEUCINE_ZIPPER 394-415; | |
| DEX0450_021.aa.1 | N | 0 - o1-1193; | 453-472, 1.23; 1066-1072, | CAMP_PHOSPHO_SITE 990-993; | VINCULIN 588-601; |
| | | | 1.099; 819-830, 1.099; | CAMP_PHOSPHO_SITE 1165-1168; | VINCULIN 572-582; FH2 |
| | | | 977-999, 1.127; 1088-1095, | PKC_PHOSPHO_SITE 427-429; | 636-1077; PRO_RICH 561-636; |
| | | | 1.087; 720-735, 1.111; | PKC_PHOSPHO_SITE 959-961; | RNASE_PANCREATIC |
| | | | 287-301, 1.237; 895-917, | CK2_PHOSPHO_SITE 959-962; | 680-686; FH2 636-1077; |
| | | | 1.103; 218-229, 1.127; | ASN_GLYCOSYLATION 1126-1129; | PRICHEXTENSN 573-594; |
| | | | 572-600, 1.117; 836-846, | PKC_PHOSPHO_SITE 404-406; MYRISTYL | PRICHEXTENSN 598-614; |
| | | | 1.212; 235-253, 1.178; | 14-19; PKC_PHOSPHO_SITE 77-79; | |
| | | | 1180-1190, 1.121; 965-970, | CK2_PHOSPHO_SITE 313-316; | |
| | | | 1.052; 367-380, 1.119; | PKC_PHOSPHO_SITE 167-169; MYRISTYL | |
| | | | 59-65, 1.053; 541-565, 1.112; | 569-574; PKC_PHOSPHO_SITE 149-151; | |
| | | | 435-450, 1.182; 304-313, | CK2_PHOSPHO_SITE 351-354; | |
| | | | 1.107; 675-690, 1.192; | CK2_PHOSPHO_SITE 118-121; MYRISTYL | |
| | | | 1097-1106, 1.185; 755-764, | 552-557; CK2_PHOSPHO_SITE 825-828; | |
| | | | 1.088; 5-14, 1.075; 322-330, | PKC_PHOSPHO_SITE 729-731; | |
| | | | 1.145; 951-961, 1.084; | CK2_PHOSPHO_SITE 526-529; | |
| | | | 18-30, 1.082; 417-423, 1.079; | CK2_PHOSPHO_SITE 350-353; | |
| | | | 42-47, 1.063; 1109-1114, | PKC_PHOSPHO_SITE 26-28; MYRISTYL | |
| | | | 1.05; 269-280, 1.136; | 853-858; PKC_PHOSPHO_SITE 704-706; | |
| | | | 607-619, 1.136; 190-214, | CK2_PHOSPHO_SITE 209-212; | |
| | | | 1.152; 1130-1135, 1.064; | PKC_PHOSPHO_SITE 231-233; | |
| | | | 176-182, 1.048; 332-352, | CK2_PHOSPHO_SITE 427-430; | |
| | | | 1.217; 400-407, 1.062; | CK2_PHOSPHO_SITE 1054-1057; | |
| | | | 880-893, 1.178; 778-810, | ASN_GLYCOSYLATION 722-725; | |
| | | | 1.167; 90-106, 1.105; | PKC_PHOSPHO_SITE 645-647; | |
| | | | 767-775, 1.058; 624-635, | CK2_PHOSPHO_SITE 993-996; | |
| | | | 1.134; 486-500, 1.153; | CK2_PHOSPHO_SITE 83-86; | |
| | | | 1028-1033, 1.072; 711-718, | ASN_GLYCOSYLATION 1177-1180; | |
| | | | 1.065; 510-515, 1.032; | CK2_PHOSPHO_SITE 187-190; | |
| | | | 386-394, 1.121; 861-871, | CK2_PHOSPHO_SITE 194-197; | |
| | | | 1.159; | ASN_GLYCOSYLATION 863-866; MYRISTYL | |
| | | | | 847-852; PKC_PHOSPHO_SITE 1162-1164; | |
| | | | | CK2_PHOSPHO_SITE 1175-1178; | |
| | | | | CK2_PHOSPHO_SITE 175-178; | |
| | | | | CK2_PHOSPHO_SITE 431-434; | |
| | | | | PKC_PHOSPHO_SITE 83-85; MYRISTYL 29-34; | |
| | | | | PKC_PHOSPHO_SITE 198-200; | |
| | | | | MYRISTYL 329-334; TYR_PHOSPHO_SITE | |
| | | | | 667-673; CK2_PHOSPHO_SITE 66-69; | |
| | | | | TYR_PHOSPHO_SITE 411-418; | |
| | | | | CK2_PHOSPHO_SITE 48-51; | |
| | | | | PKC_PHOSPHO_SITE 1127-1129; | |
| | | | | CK2_PHOSPHO_SITE 302-305; | |
| | | | | CK2_PHOSPHO_SITE 1179-1182; | |
| | | | | PKC_PHOSPHO_SITE 1146-1148; MYRISTYL | |
| | | | | 1060-1065; PKC_PHOSPHO_SITE 480-482; | |
| | | | | CAMP_PHOSPHO_SITE 1079-1082; | |
| | | | | PKC_PHOSPHO_SITE 1096-1098; | |
| DEX0450_022.aa.1 | N | 0 - o1-650; | 80-87, 1.064; 202-208, 1.098; | PKC_PHOSPHO_SITE 419-421; MYRISTYL | PRICHEXTENSN 456-481; |
| | | | 452-473, 1.096; 48-54, 1.088; | 624-629; MYRISTYL 176-181; | PRICHEXTENSN 334-346; |
| | | | 163-172, 1.164; 4-12, 1.085; | PKC_PHOSPHO_SITE 358-360; | sp_Q9H271_Q9H271_HUMAN |
| | | | 602-614, 1.141; 505-537, | PKC_PHOSPHO_SITE 539-541; | 190-334; PRO_RICH 334-557; |
| | | | 1.219; 216-226, 1.094; | CK2_PHOSPHO_SITE 617-620; | Nop 186-334; |
| | | | 479-503, 1.208; 108-113, | PKC_PHOSPHO_SITE 375-377; MYRISTYL | PRICHEXTENSN 425-442; |
| | | | 1.065; 425-449, 1.141; | 369-374; CK2_PHOSPHO_SITE 39-42; | |
| | | | 244-254, 1.104; 156-161, | MYRISTYL 398-403; PKC_PHOSPHO_SITE | |
| | | | 1.052; 542-554, 1.175; | 119-121; CK2_PHOSPHO_SITE 180-183; | |
| | | | 380-396, 1.161; 626-637, | ASN_GLYCOSYLATION 98-101; | |
| | | | 1.111; 41-46, 1.047; | CK2_PHOSPHO_SITE 307-310; | |
| | | | 570-576, 1.065; 89-102, | PKC_PHOSPHO_SITE 581-583; | |
| | | | 1.126; 292-308, 1.145; | ASN_GLYCOSYLATION 218-221; MYRISTYL | |
| | | | 231-237, 1.042; 264-286, | 233-238; MYRISTYL 236-241; | |
| | | | 1.134; 125-140, 1.114; | CK2_PHOSPHO_SITE 558-561; MYRISTYL | |
| | | | 334-348, 1.136; | 363-368; ASN_GLYCOSYLATION 240-243; | |
| | | | | MYRISTYL 224-229; CK2_PHOSPHO_SITE | |
| | | | | 138-141; ASN_GLYCOSYLATION 161-164; | |
| | | | | ASN_GLYCOSYLATION 198-201; | |
| | | | | CK2_PHOSPHO_SITE 2-5; | |
| | | | | PKC_PHOSPHO_SITE 47-49; | |
| | | | | TYR_PHOSPHO_SITE 559-565; | |
| | | | | PKC_PHOSPHO_SITE 617-619; MYRISTYL | |
| | | | | 20-25; MYRISTYL 497-502; MYRISTYL | |
| | | | | 613-618; CK2_PHOSPHO_SITE 22-25; | |
| | | | | PKC_PHOSPHO_SITE 138-140; | |
| DEX0450_022.orf.1 | N | 0 - o1-369; | 100-113, 1.126; 345-359, | ASN_GLYCOSYLATION 172-175; MYRISTYL | sp_Q9H271_Q9H271_HUMAN |
| | | | 1.136; 59-65, 1.088; | 9-14; PKC_PHOSPHO_SITE 149-151; | 201-345; Nop 197-345; |
| | | | 303-319, 1.145; 15-23, 1.085; | MYRISTYL 235-240; ASN_GLYCOSYLATION | |
| | | | 174-183, 1.164; 275-297, | 251-254; CK2_PHOSPHO_SITE 33-36; | |
| | | | 1.134; 167-172, 1.052; | MYRISTYL 244-249; CK2_PHOSPHO_SITE | |
| | | | 227-237, 1.094; 91-98, 1.064; | 318-321; CK2_PHOSPHO_SITE 13-16; | |
| | | | 136-151, 1.114; 119-124, | ASN_GLYCOSYLATION 209-212; | |
| | | | 1.065; 255-265, 1.104; | CK2_PHOSPHO_SITE 50-53; MYRISTYL | |
| | | | 242-248, 1.042; 52-57, 1.047; | 187-192; MYRISTYL 11-16; | |
| | | | 213-219, 1.098; | ASN_GLYCOSYLATION 229-232; AMIDATION | |
| | | | | 366-369; MYRISTYL 247-252; MYRISTYL | |
| | | | | 31-36; CK2_PHOSPHO_SITE 191-194; | |
| | | | | PKC_PHOSPHO_SITE 130-132; | |
| | | | | CK2_PHOSPHO_SITE 149-152; | |
| | | | | ASN_GLYCOSYLATION 109-112; | |
| | | | | PKC_PHOSPHO_SITE 58-60; | |
| DEX0450_023.aa.1 | Y | 0 - o1-164; | 27-32, 1.031; 116-135, 1.152; | PKC_PHOSPHO_SITE 124-126; | ER_TARGET 161-164; |
| | | | 54-59, 1.094; 74-89, 1.127; | CK2_PHOSPHO_SITE 67-70; | THIOREDOXIN 73-81; |
| | | | 101-114, 1.102; 39-48, 1.106; | CAMP_PHOSPHO_SITE 138-141; MYRISTYL | THIOREDOXIN 74-92; |
| | | | 150-159, 1.138; 6-23, 1.08; | 15-20; MYRISTYL 105-110; MYRISTYL | THIOREDOXIN_2 55-158; |
| | | | | 54-59; CK2_PHOSPHO_SITE 91-94; | THIOREDOXIN 81-90; |
| | | | | MYRISTYL 32-37; CK2_PHOSPHO_SITE 38-41; | THIOREDOXIN 124-135; |
| | | | | AMIDATION 136-139; | thiored 53-161; |
| | | | | PKC_PHOSPHO_SITE 24-26; | |
| | | | | CK2_PHOSPHO_SITE 96-99; | |
| | | | | PKC_PHOSPHO_SITE 96-98; | |
| DEX0450_023.aa.2 | N | 0 —i1-31; | 17-28, 1.096; 5-13, 1.067; | TYR_PHOSPHO_SITE 13-19; | |
| | | | | PKC_PHOSPHO_SITE 11-13; | |
| | | | | CK2_PHOSPHO_SITE 24-27; | |
| DEX0450_023.orf.2 | N | 0 - o1-110; | 4-11, 1.144; 80-99, 1.195; | ASN_GLYCOSYLATION 31-34; | |
| | | | 35-63, 1.145; | CK2_PHOSPHO_SITE 13-16; | |
| | | | | ASN_GLYCOSYLATION 100-103; | |
| DEX0450_023.aa.3 | N | 1 —i1-20; | 19-36, 1.212; | | |
| | | tm21-38; | | | |
| | | o39-39; | | | |
| DEX0450_023.orf.3 | N | 0 - o1-110; | 80-99, 1.195; 4-11, 1.144; | ASN_GLYCOSYLATION 100-103; | |
| | | | 35-63, 1.145; | CK2_PHOSPHO_SITE 13-16; | |
| | | | | ASN_GLYCOSYLATION 31-34; | |
| DEX0450_024.aa.1 | N | 0 - o1-140; | 35-42, 1.129; 111-137, 1.283; | AMIDATION 2-5; PKC_PHOSPHO_SITE 52-54; | Flavodoxin_2 4-140; |
| | | | 65-89, 1.119; 4-13, 1.181; | CK2_PHOSPHO_SITE 52-55; | |
| | | | 26-31, 1.071; 94-104, 1.167; | PKC_PHOSPHO_SITE 13-15; | |
| | | | | PKC_PHOSPHO_SITE 57-59; | |
| DEX0450_025.aa.1 | N | 0 - o1-73; | 19-28, 1.168; 62-70, 1.085; | CK2_PHOSPHO_SITE 41-44; MYRISTYL 28-33; | sp_O77641_CATK_MACFA 7-71; |
| | | | | | PAPAIN 35-41; |
| | | | | | THIOL_PROTEASE_ASN 35-54; |
| | | | | | PAPAIN 20-30; |
| | | | | | THIOL_PROTEASE_HIS 18-28; |
| DEX0450_025.orf.1 | N | 0 - o1-72; | 18-27, 1.168; 60-69, 1.085; | PKC_PHOSPHO_SITE 1-3; MYRISTYL 27-32; | PAPAIN 34-40; PAPAIN |
| | | | | CK2_PHOSPHO_SITE 40-43; | 19-29; |
| | | | | | sp_O77641_CATK_MACFA 4-70; |
| | | | | | THIOL_PROTEASE_HIS |
| | | | | | 17-27; |
| | | | | | THIOL_PROTEASE_ASN 34-53; |
| DEX0450_026.aa.1 | Y | 7 - o1-19; | 4-253, 1.334; 263-270, 1.114; | MYRISTYL 273-278; PKC_PHOSPHO_SITE | LEU_RICH 56-229; |
| | | tm20-42; | 282-318, 1.14; | 294-296; PKC_PHOSPHO_SITE 170-172; | PHE_RICH 16-168; |
| | | i43-54; | | PKC_PHOSPHO_SITE 167-169; | |
| | | tm55-77; | | PKC_PHOSPHO_SITE 10-12; MYRISTYL | |
| | | o78-80; | | 232-237; LEUCINE_ZIPPER 124-145; | |
| | | tm81-103; | | MYRISTYL 7-12; | |
| | | i104-119; | | | |
| | | tm120-142; | | | |
| | | o143-151; | | | |
| | | tm152-171; | | | |
| | | i172-177; | | | |
| | | tm178-200; | | | |
| | | o201-223; | | | |
| | | tm224-246; | | | |
| | | i247-321; | | | |
| DEX0450_026.orf.1 | Y | 8 —i1-1; | 4-194, 1.278; 275-317; 1.166; | CAMP_PHOSPHO_SITE 260-263; | LEU_RICH 2-175; |
| | | tm2-19; | 197-262, 1.381; | PKC_PHOSPHO_SITE 81-83; MYRISTYL 61-66; | C_TYPE_LECTIN_1 102-128; |
| | | o20-23; | | MYRISTYL 40-45; PKC_PHOSPHO_SITE | CYS_RICH 218-246; |
| | | tm24-46; | | 258-260; | |
| | | i47-84; | | | |
| | | tm85-107; | | | |
| | | o108-116; | | | |
| | | tm117-139; | | | |
| | | i140-145; | | | |
| | | tm146-168; | | | |
| | | o169-200; | | | |
| | | tm201-223; | | | |
| | | i224-229; | | | |
| | | tm230-252; | | | |
| | | o253-295; | | | |
| | | tm296-318; | | | |
| | | i319-320; | | | |
| DEX0450_026.orf.2 | Y | 8 —i1-1; | 197-262, 1.381; 275-317, | PKC_PHOSPHO_SITE 258-260; | LEU_RICH 2-175; |
| | | tm2-19; | 1.166; 4-194, 1.278; | CAMP_PHOSPHO_SITE 260-263; | CYS_RICH 218-246; |
| | | o20-23; | | PKC_PHOSPHO_SITE 81-83; MYRISTYL 61-66; | C_TYPE_LECTIN_1 102-128; |
| | | tm24-46; | | MYRISTYL 40-45; | |
| | | i47-84; | | | |
| | | tm85-107; | | | |
| | | o108-116; | | | |
| | | tm117-139; | | | |
| | | i140-145; | | | |
| | | tm146-168; | | | |
| | | o169-200; | | | |
| | | tm201-223; | | | |
| | | i224-229; | | | |
| | | tm230-252; | | | |
| | | o253-295; | | | |
| | | tm296-318; | | | |
| | | i319-320; | | | |
| DEX0450_027.aa.1 | N | 0 - o1-684; | 158-165, 1.097; 291-299, | AMIDATION 403-406; TYR_PHOSPHO_SITE | TPR_REPEAT_2 242-275; |
| | | | 1.087; 21-28, 1.156; | 238-245; MYRISTYL 106-111; | TPR_REGION_1 62-135; |
| | | | 120-132, 1.207; 59-93, 1.114; | PKC_PHOSPHO_SITE 677-679; | TPR_REGION_2 202-355; |
| | | | 141-156, 1.088; 220-233, | ASN_GLYCOSYLATION 458-461; MYRISTYL | TPR_REPEAT_3 282-315; |
| | | | 1.091; 611-619, 1.092; | 289-294; MYRISTYL 329-334; | TPR_REPEAT_4 322-355; |
| | | | 211-216, 1.072; 175-184, | CK2_PHOSPHO_SITE 625-628; | TPR_102-135; GoLoco |
| | | | 1.105; 13-19, 1.104; | LEUCINE_ZIPPER 68-89; | 594-616; GoLoco 594-616; |
| | | | 631-638, 1.103; 41-56, 1.122; | ASN_GLYCOSYLATION 367-370; AMIDATION | GoLoco 628-650; |
| | | | 646-652, 1.094; 30-39, 1.108; | 451-454; AMIDATION 677-680; | TPR 62-95; GoLoco 628-650; |
| | | | 277-289, 1.132; 461-466, | CK2_PHOSPHO_SITE 45-48; | TPR 142-188; TPR |
| | | | 1.074; 507-514, 1.12; | PKC_PHOSPHO_SITE 441-443; AMIDATION | 62-95; TPR 282-315; TPR |
| | | | 346-352, 1.057; 111-117, | 639-642; CAMP_PHOSPHO_SITE 480-483; | 322-355; TPR 242-275; |
| | | | 1.079; 493-499, 1.072; | CK2_PHOSPHO_SITE 7-10; | GoLoco 489-511; TPR |
| | | | 301-313, 1.124; 547-554, | CAMP_PHOSPHO_SITE 405-408; | 142-188; TPR 202-235; |
| | | | 1.112; 534-542, 1.186; | PKC_PHOSPHO_SITE 7-9; | TPR 102-135; TPR 282-315; |
| | | | 396-402, 1.035; 429-450, | PKC_PHOSPHO_SITE 111-113; | TPR 322-355; |
| | | | 1.14; 250-256, 1.067; | PKC_PHOSPHO_SITE 478-480; | sp o42393 RAPS CHICK |
| | | | 598-607, 1.155; 325-335, | PKC_PHOSPHO_SITE 501-503; | 172-356; GoLoco 544-566; |
| | | | 1.054; 578-585, 1.147; | PKC_PHOSPHO_SITE 460-462; | TPR 242-275; |
| | | | 188-195, 1.16; 566-573, | PKC_PHOSPHO_SITE 363-365; | TPR_REPEAT_1 62-95; |
| | | | 1.067; 624-629, 1.03; | ASN_GLYCOSYLATION 382-385; | GoLoco 544-566; TPR |
| | | | 266-274, 1.136; 371-378, | CK2_PHOSPHO_SITE 23-26; | 202-235; GoLoco 489-511; |
| | | | 1.135; | CK2_PHOSPHO_SITE 94-97; | |
| | | | | PKC_PHOSPHO_SITE 620-622; | |
| | | | | LEUCINE_ZIPPER 61-82; | |
| | | | | PKC_PHOSPHO_SITE 556-558; MYRISTYL | |
| | | | | 571-576; CK2_PHOSPHO_SITE 260-263; | |
| | | | | CK2_PHOSPHOSITE 486-489; | |
| | | | | CK2_PHOSPHOSITE 607-610; MYRISTYL | |
| | | | | 206-211; ASN_GLYCOSYLATION 188-191; | |
| | | | | CK2_PHOSPHO_SITE 390-393; MYRISTYL | |
| | | | | 376-381; | |
| DEX0450_028.aa.1 | N | 0 - o1-499; | 247-262, 1.118; 106-113, | PKC_PHOSPHO_SITE 390-392; | AMINO1PTASE 308-326; |
| | | | 1.132; 195-204, 1.181; | CK2_PHOSPHO_SITE 439-442; | AMINO1PTASE 168-185; |
| | | | 320-341, 1.163; 476-485, | PKC_PHOSPHO_SITE 241-243; | AMINO1PTASE 131-151; |
| | | | 1.094; 161-182, 1.143; | CK2_PHOSPHO_SITE 138-141; | AMINO1PTASE 350-366; |
| | | | 224-245, 1.198; 356-366, | PKC_PHOSPHO_SITE 63-65; | Peptidase_M18 34-435; |
| | | | 1.115; 374-402, 1.129; | CK2_PHOSPHO_SITE 423-426; MYRISTYL | AMINO1PTASE 98-114; |
| | | | 82-96, 1.116; 404-420, 1.07; | 95-100; PKC_PHOSPHO_SITE 116-118; | |
| | | | 118-129, 1.111; 265-271, | MYRISTYL 133-138; CK2_PHOSPHO_SITE | |
| | | | 1.084; 424-456, 1.183; | 341-344; MYRISTYL 294-299; | |
| | | | 273-308, 1.192; 40-58, 1.139; | CAMP_PHOSPHO_SITE 331-334; | |
| | | | 21-38, 1.098; 143-157, 1.176; | PKC_PHOSPHO_SITE 420-422; | |
| | | | 458-474, 1.063; 98-103, | PKC_PHOSPHO_SITE 157-159; | |
| | | | 1.078; 348-353, 1.032; | ASN_GLYCOSYLATION 446-449; | |
| | | | | CK2_PHOSPHO_SITE 241-244; MYRISTYL | |
| | | | | 314-319; CK2_PHOSPHO_SITE 306-309; | |
| | | | | ASN_GLYCOSYLATION 79-82; MYRISTYL | |
| | | | | 459-464; MYRISTYL 134-139; | |
| | | | | CAMP_PHOSPHO_SITE 113-116; MYRISTYL | |
| | | | | 465-470; | |
| DEX0450_028.orf.1 | N | 0 - o1-407; | 98-112, 1.116; 289-324, | MYRISTYL 150-155; CK2_PHOSPHO_SITE | AMINO1PTASE 114-130; |
| | | | 1.192; 281-287, 1.084; | 322-325; MYRISTYL 149-154; MYRISTYL | Peptidase M18 50-407; |
| | | | 263-278, 1.118; 211-220, | 1-6; PKC_PHOSPHO_SITE 257-259; | AMINO1PTASE 184-201; |
| | | | 1.181; 372-382, 1.115; | CAMP_PHOSPHO_SITE 129-132; | AMINO1PTASE 324-342; |
| | | | 37-54, 1.098; 122-129, 1.132; | CK2_PHOSPHO_SITE 357-360; MYRISTYL | AMINO1PTASE 366-382; |
| | | | 336-357, 1.163; 364-369, | 111-116; PKC_PHOSPHO_SITE 132-134; | AMINO1PTASE 147-167; |
| | | | 1.032; 177-198, 1.143; | MYRISTYL 310-315; CAMP_PHOSPHO_SITE | |
| | | | 56-74, 1.139; 134-145, 1.111; | 347-350; MYRISTYL 14-19; | |
| | | | 390-404, 1.129; 159-173, | PKC_PHOSPHO_SITE 173-175; | |
| | | | 1.176; 240-261, 1.198; | PKC_PHOSPHO_SITE 79-81; | |
| | | | 114-119, 1.078; | CK2_PHOSPHO_SITE 154-157; | |
| | | | | ASN_GLYCOSYLATION 95-98; | |
| | | | | CK2_PHOSPHO_SITE 257-260; MYRISTYL | |
| | | | | 15-20; MYRISTYL 330-335; | |
| DEX0450_029.aa.1 | N | 0 - o1-31; | 17-28, 1.086; | CK2_PHOSPHO_SITE 5-8; | |
| DEX0450_029.orf.1 | N | 1 —01-14; | 49-58, 1.065; 5-35, 1.167; | CK2_PHOSPHO_SITE 11-14; | |
| | | tm15-34; | 39-47, 1.084; 61-66, 1.186; | PKC_PHOSPHO_SITE 61-63; MYRISTYL 31-36; | |
| | | i35-69; | | MYRISTYL 1-6; | |
| DEX0450_030.aa.1 | N | 0 —i1-89; | 31-37, 1.049; 52-63, 1.073; | MYRISTYL 14-19; MYRISTYL 18-23; | THR_RICH 46-87; |
| | | | 4-12, 1.091; 40-50, 1.107; | PKC_PHOSPHO_SITE 64-66; MYRISTYL 8-13; | |
| | | | | PKC_PHOSPHO_SITE 40-42; | |
| | | | | PKC_PHOSPHO_SITE 68-70; | |
| DEX0450_030.orf.1 | N | 0 - o1-86; | 49-60, 1.073; 37-47, 1.107; | MYRISTYL 14-19; PKC_PHOSPHO_SITE 61-63; | THR_RICH 43-84; |
| | | | 28-34, 1.049; | PKC_PHOSPHO_SITE 37-39; | |
| | | | | PKC_PHOSPHO_SITE 65-67; MYRISTYL 2-7; | |
| DEX0450_031.aa.1 | N | 1 —i1-98; | 191-199, 1.133; 18-23, 1.038; | PKC_PHOSPHO_SITE 354-356; MYRISTYL | THYROGLOBULIN_1 278-307; |
| | | tm99-121; | 161-167, 1.103; 256-277, | 88-93; PKC_PHOSPHO_SITE 58-60; | TY 279-325; |
| | | o122-404; | 1.166; 130-138, 1.071; | PKC_PHOSPHO_SITE 330-332; | thyroglobulin_1 263-321; |
| | | | 288-305, 1.202; 95-114, | PKC_PHOSPHO_SITE 337-339; | |
| | | | 1.206; 236-243, 1.078; | CK2_PHOSPHO_SITE 211-214; | |
| | | | 362-401, 1.221; 44-50, 1.087; | CAMP_PHOSPHO_SITE 53-56; | |
| | | | 27-38, 1.189; 148-155, 1.071; | PKC_PHOSPHO_SITE 277-279; | |
| | | | 201-211, 1.157; 117-125, | CK2_PHOSPHO_SITE 58-61; MYRISTYL 97-102; | |
| | | | 1.108; 324-332, 1.126; | ASN_GLYCOSYLATION 306-309; | |
| | | | 342-348, 1.06; 4-12, 1.043; | AMIDATION 83-86; ASN_GLYCOSYLATION | |
| | | | | 320-323; PKC_PHOSPHO_SITE 322-324; | |
| | | | | AMIDATION 51-54; ASN_GLYCOSYLATION | |
| | | | | 180-183; TYR_PHOSPHO_SITE 281-288; | |
| | | | | ASN_GLYCOSYLATION 186-189; MYRISTYL | |
| | | | | 113-118; CK2_PHOSPHO_SITE 75-78; | |
| DEX0450_031.orf.1 | N | 0 - o1-371; | 97-105, 1.071; 329-368, | AMIDATION 19-22; ASN_GLYCOSYLATION | TY 246-292; |
| | | | 1.221; 255-272, 1.202; | 153-156; PKC_PHOSPHO_SITE 304-306; | thyroglobulin_1 230-288; |
| | | | 223-244, 1.166; 128-134, | ASN_GLYCOSYLATION 147-150; | THYROGLOBULIN_1 |
| | | | 1.103; 62-81, 1.206; | TYR_PHOSPHO_SITE 248-255; MYRISTYL | 245-274; |
| | | | 168-178, 1.157; 84-92, 1.108; | 80-85; ASN_GLYCOSYLATION 287-290; | |
| | | | 309-315, 1.06; 4-18, 1.126; | MYRISTYL 64-69; PKC_PHOSPHO_SITE | |
| | | | 203-210, 1.078; 291-299, | 289-291; AMIDATION 50-53; | |
| | | | 1.126; 158-166, 1.133; | CK2_PHOSPHO_SITE 178-181; | |
| | | | 115-122, 1.071; | CK2_PHOSPHO_SITE 42-45; | |
| | | | | PKC_PHOSPHO_SITE 297-299; | |
| | | | | PKC_PHOSPHO_SITE 25-27; | |
| | | | | PKC_PHOSPHO_SITE 244-246; MYRISTYL | |
| | | | | 19-24; PKC_PHOSPHO_SITE 321-323; | |
| | | | | CK2_PHOSPHO_SITE 25-28; MYRISTYL 55-60; | |
| | | | | ASN_GLYCOSYLATION 273-276; | |
| DEX0450_031.aa.2 | N | 0 - o1-102; | 56-63, 1.078; 89-95, 1.067; | CK2_PHOSPHO_SITE 93-96; | |
| | | | 21-31, 1.157; | CK2_PHOSPHO_SITE 31-34; MYRISTYL 89-94; | |
| | | | | GLYCOSAMINOGLYCAN 88-91; | |
| DEX0450_031.orf.2 | N | 0 —i1-102; | 62-75, 1.231; 85-93, 1.058; | CAMP_PHOSPHO_SITE 4-7; | |
| | | | 38-48, 1.152; 7-36, 1.126; | CK2_PHOSPHO_SITE 46-49; MYRISTYL 55-60; | |
| DEX0450_032.aa.1 | N | 0 - o1-273; | 13-20, 1.106; 175-192, 1.139; | PKC_PHOSPHO_SITE 267-269; MYRISTYL | RRM 181-255; RRM 182-251; |
| | | | 120-136, 1.128; 30-57, 1.253; | 201-206; CK2_PHOSPHO_SITE 29-32; | rrm 183-250; |
| | | | 142-149, 1.138; 4-9, 1.134; | ASN_GLYCOSYLATION 164-167; | |
| | | | 234-266, 1.176; 64-102, | CK2_PHOSPHO_SITE 193-196; MYRISTYL | |
| | | | 1.179; 194-213, 1.141; | 74-79; CK2_PHOSPHO_SITE 43-46; | |
| | | | | MYRISTYL 94-99; PKC_PHOSPHO_SITE | |
| | | | | 166-168; MYRISTYL 121-126; | |
| DEX0450_032.orf.1 | N | 0 - o1-227; | 4-14, 1.073, 77-90, 1.156; | CK2_PHOSPHO_SITE 147-150; | RRM 135-209; RRM 136-205; |
| | | | 148-167, 1.141, 129-146, | PKC_PHOSPHO_SITE 120-122; MYRISTYL | rrm 137-204; |
| | | | 1.139; 19-66, 1.216, 96-103, | 155-160; MYRISTYL 37-42; | |
| | | | 1.138; 188-220, 1.176; | PKC_PHOSPHO_SITE 221-223; MYRISTYL | |
| | | | | 64-69; MYRISTYL 77-82; AMIDATION 16-19; | |
| | | | | ASN_GLYCOSYLATION 118-121; | |
| | | | | CAMP_PHOSPHO_SITE 18-21; | |
| | | | | CK2_PHOSPHO_SITE 6-9; | |
| DEX0450_032.aa.2 | Y | 0 - o1-452; | 35-60, 1.152; 236-250, 1.11; | PKC_PHOSPHO_SITE 93-95; | RRM 109-206; RRM 261-337; |
| | | | 102-119, 1.139; 224-234, | ASN_GLYCOSYLATION 91-94; | rrm 263-330; rrm |
| | | | 1.126; 69-76, 1.138; 26-32, | CK2_PHOSPHO_SITE 442-445; MYRISTYL | 110-205; RRM 262-331; |
| | | | 1.049; 167-175, 1.08; | 44-49; CK2_PHOSPHO_SITE 120-123; | ANTIFREEZEI 221-232; |
| | | | 371-382, 1.074; 300-319, | PKC_PHOSPHO_SITE 162-164; | hnRNP-L_PTB 106-445; |
| | | | 1.121; 403-409, 1.05; | PKC_PHOSPHO_SITE 9-11; | ANTIFREEZEI 238-247; |
| | | | 324-343, 1.153; 411-419, | PKC_PHOSPHO_SITE 61-63; MYRISTYL 60-65; | |
| | | | 1.055; 5-17, 1.091; 384-393, | MYRISTYL 128-133; MYRISTYL 251-256; | |
| | | | 1.073; 189-208, 1.13; | CK2_PHOSPHO_SITE 353-356; | |
| | | | 257-292, 1.18; 151-160, | MYRISTYL 433-438; RGD 438-440; | |
| | | | 1.165; 121-140, 1.141; | TYR_PHOSPHO_SITE 262-270; MYRISTYL | |
| | | | | 161-166; CK2_PHOSPHO_SITE 20-23; | |
| | | | | PKC_PHOSPHO_SITE 20-22; MYRISTYL | |
| | | | | 153-158; PKC_PHOSPHO_SITE 429-431; | |
| | | | | CAMP_PHOSPHO_SITE 62-65; | |
| | | | | PKC_PHOSPHO_SITE 329-331; | |
| DEX0450_032.orf.2 | N | 0 - o1-304; | 41-60, 1.13; 19-27, 1.08; | PKC_PHOSPHO_SITE 14-16; RGD 290-292; | RRM 114-183; |
| | | | 176-195, 1.153; 223-234, | MYRISTYL 285-290; CK2_PHOSPHO_SITE | ANTIFREEZEI 90-99; |
| | | | 1.074; 4-12, 1.065; 76-86, | 294-297; CK2_PHOSPHO_SITE 205-208; | ANTIFREEZEI 73-84; rrm |
| | | | 1.126; 263-271, 1.055; | MYRISTYL 13-18; TYR_PHOSPHO_SITE | 115-182; RRM 113-189; |
| | | | 255-261, 1.05; 88-102, 1.11; | 114-122; PKC_PHOSPHO_SITE 181-183; | |
| | | | 236-245, 1.073; 152-171, | MYRISTYL 103-108; PKC_PHOSPHO_SITE | |
| | | | 1.121; 109-144, 1.18; | 281-283; | |
| DEX0450_032.aa.3 | Y | 0 - o1-606; | 536-543, 1.124; 324-343, | MYRISTYL 251-256; MYRISTYL 563-568; | hnRNP-L_PTB 106-546; |
| | | | 1.153; 373-379, 1.05; | PKC_PHOSPHO_SITE 93-95; | RRM 262-331; RRM 109-206; |
| | | | 35-60, 1.152; 576-592, 1.115; | PKC_PHOSPHO_SITE 9-11; | RRM 261-337; rrm |
| | | | 121-140, 1.141; 5-17, 1.091; | PKC_PHOSPHO_SITE 575-577; | 110-205; rrm 263-330; |
| | | | 102-119, 1.139; 224-234, | PKC_PHOSPHO_SITE 20-22; MYRISTYL 44-49; | |
| | | | 1.126; 151-158, 1.129; | PKC_PHOSPHO_SITE 61-63; MYRISTYL | |
| | | | 189-208, 1.13; 166-173, | 60-65; PKC_PHOSPHO_SITE 329-331; | |
| | | | 1.139; 434-446, 1.148; | CK2_PHOSPHO_SITE 461-464; MYRISTYL | |
| | | | 257-292, 1.18; 395-426, | 163-168; PKC_PHOSPHO_SITE 381-383; | |
| | | | 1.154; 236-250, 1.11; | PKC_PHOSPHO_SITE 458-460; | |
| | | | 300-319, 1.121; 69-76, 1.138; | ASN_GLYCOSYLATION 482-485; | |
| | | | 448-520, 1.174; 550-565, | CK2_PHOSPHO_SITE 120-123; | |
| | | | 1.144; 26-32, 1.049; | CK2_PHOSPHO_SITE 353-356; | |
| | | | | CAMP_PHOSPHO_SITE 62-65; MYRISTYL | |
| | | | | 128-133; TYR_PHOSPHO_SITE 262-270; | |
| | | | | PKC_PHOSPHO_SITE 501-503; MYRISTYL | |
| | | | | 523-528; MYRISTYL 467-472; | |
| | | | | CK2_PHOSPHO_SITE 20-23; | |
| | | | | ASN_GLYCOSYLATION 91-94; MYRISTYL | |
| | | | | 396-401; PKC_PHOSPHO_SITE 414-416; | |
| | | | | MYRISTYL 556-561; PKC_PHOSPHO_SITE | |
| | | | | 389-391; | |
| DEX0450_032.orf.3 | N | 0 - o1-227; | 76-86, 1.126; 4-12, 1.065; | PKC_PHOSPHO_SITE 14-16; MYRISTYL | RRM 113-189; |
| | | | 41-60, 1.13; 19-27, 1.08; 88-102, | 103-108; PKC_PHOSPHO_SITE 181-183; | ANTIFREEZEI 73-84; |
| | | | 1.11; 109-144, 1.18; | TYR_PHOSPHO_SITE 114-122; | ANTIFREEZEI 90-99; rrm |
| | | | 152-171, 1.121; 176-195, | CK2_PHOSPHO_SITE 205-208; MYRISTYL | 115-182; RRM 114-183; |
| | | | 1.153; | 13-18; | |
| DEX0450_032.aa.4 | Y | 0 - o1-432; | 224-234, 1.126; 189-208, | PKC_PHOSPHO_SITE 61-63; | HOMSERKINASE 242-257; |
| | | | 1.13; 69-76, 1.138; 300-319, | PKC_PHOSPHO_SITE 162-164; | HOMSERKINASE 403-418; |
| | | | 1.121; 373-409, 1.139; | PKC_PHOSPHO_SITE 329-331; MYRISTYL | RRM 109-206; rrm 263-330; |
| | | | 151-160, 1.165; 102-119, | 251-256; CK2_PHOSPHO_SITE 20-23; | rrm 110-205; |
| | | | 1.139; 257-292, 1.18; | PKC_PHOSPHO_SITE 93-95; MYRISTYL | ANTIFREEZEI 238-247; |
| | | | 167-175, 1.08; 26-32, 1.049; | 153-158; MYRISTYL 44-49; | ALA_RICH 371-411; |
| | | | 324-343, 1.153; 5-17, 1.091; | CAMP_PHOSPHO_SITE 62-65; MYRISTYL | ANTIFREEZEI 221-232; |
| | | | 121-140, 1.141; 236-250, | 128-133; MYRISTYL 60-65; | hnRNP-L_PTB 106-432; |
| | | | 1.11; 35-60, 1.152; 412-421, | PKC_PHOSPHO_SITE 20-22; MYRISTYL | KV14CHANNEL 392-402; |
| | | | 1.186; | 161-166; PKC_PHOSPHO_SITE 9-11; | KV14CHANNEL 405-414; |
| | | | | TYR_PHOSPHO_SITE 262-270; | RRM 261-337; RRM 262-331; |
| | | | | CK2_PHOSPHO_SITE 120-123; MYRISTYL | |
| | | | | 410-415; CK2_PHOSPHO_SITE 353-356; | |
| | | | | MYRISTYL 407-412; ASN_GLYCOSYLATION | |
| | | | | 91-94; | |
| DEX0450_032.orf.4 | N | 0 - o1-284; | 225-261, 1.139; 152-171, | MYRISTYL 13-18; PKC_PHOSPHO_SITE | HOMSERKINASE 94-109; |
| | | | 1.121; 4-12, 1.065; 176-195, | 181-183; MYRISTYL 262-267; | ANTIFREEZEI 90-99; |
| | | | 1.153; 109-144, 1.18; | CK2_PHOSPHO_SITE 205-208; | HOMSERKINASE 255-270; |
| | | | 19-27, 1.08; 76-86, 1.126; | TYR_PHOSPHO_SITE 114-122; | ALA_RICH 223-263; |
| | | | 264-273, 1.186; 88-102, 1.11; | PKC_PHOSPHO_SITE 14-16; MYRISTYL | ANTIFREEZEI 73-84; rrm |
| | | | 41-60, 1.13; | 103-108; MYRISTYL 259-264; | 115-182; RRM 113-189; |
| | | | | | KV14CHANNEL 257-266; |
| | | | | | KV14CHANNEL 244-254; |
| | | | | | RRM 114-183; |
| DEX0450_032.orf.5 | N | 0 - o1-304; | 152-171, 1.121; 88-102, 1.11; | MYRISTYL 285-290; PKC_PHOSPHO_SITE | RRM 114-183; |
| | | | 19-27, 1.08; 109-144, 1.18; | 14-16; MYRISTYL 103-108; MYRISTYL | ANTIFREEZEI 73-84; |
| | | | 76-86, 1.126; 236-245, 1.073; | 13-18; PKC_PHOSPHO_SITE 181-183; RGD | ANTIFREEZEI 90-99; rrm |
| | | | 176-195, 1.153; 255-261, | 290-292; CK2_PHOSPHO_SITE 205-208; | 115-182; RRM 113-189; |
| | | | 1.05; 41-60, 1.13; 263-271, | CK2_PHOSPHO_SITE 294-297; | |
| | | | 1.055; 223-234, 1.074; | TYR_PHOSPHO_SITE 114-122; | |
| | | | 4-12, 1.065; | PKC_PHOSPHO_SITE 281-283; | |
| DEX0450_032.orf.6 | N | 0 - o1-304; | 109-144, 1.18; 176-195, | PKC_PHOSPHO_SITE 281-283; MYRISTYL | RRM 113-189; RRM 114-183; |
| | | | 1.153; 88-102, 1.11; | 103-108; RGD 290-292; | ANTIFREEZEI 90-99; |
| | | | 263-271, 1.055; 236-245, | PKC_PHOSPHO_SITE 14-16; | rrm 115-182; |
| | | | 1.073; 19-27, 1.08; 41-60, | PKC_PHOSPHO_SITE 181-183; MYRISTYL | ANTIFREEZEI 73-84; |
| | | | 1.13; 255-261, 1.05; 223-234, | 285-290; MYRISTYL 13-18; | |
| | | | 1.074; 152-171, 1.121; | CK2_PHOSPHO_SITE 205-208; | |
| | | | 76-86, 1.126; 4-12, 1.065; | TYR_PHOSPHO_SITE 114-122; | |
| | | | | CK2_PHOSPHO_SITE 294-297; | |
| DEX0450_032.orf.7 | N | 0 - o1-304; | 255-261, 1.05; 88-102, 1.11; | MYRISTYL 13-18; CK2_PHOSPHO_SITE | rrm 115-182; RPM 114-183; |
| | | | 152-171, 1.121; 76-86, 1.126; | 205-208; PKC_PHOSPHO_SITE 14-16; RGD | ANTIFREEZEI 90-99; |
| | | | 176-195, 1.153; 19-27, 1.08; | 290-292; MYRISTYL 285-290; MYRISTYL | RRM 113-189; |
| | | | 236-245, 1.073; 263-271, | 103-108; PKC_PHOSPHO_SITE 281-283; | ANTIFREEZEI 73-84; |
| | | | 1.055; 4-12, 1.065; 223-234, | CK2_PHOSPHO_SITE 294-297; | |
| | | | 1.074; 109-144, 1.18; | PKC_PHOSPHO_SITE 181-183; | |
| | | | 41-60, 1.13; | TYR_PHOSPHO_SITE 114-122; | |
| DEX0450_033.aa.1 | N | 0 - o1-315; | 231-237, 1.068; 208-213, | MYRISTYL 64-69; CK2_PHOSPHO_SITE | TYPE2KERATIN 178-191; |
| | | | 1.081; 4-23, 1.174; 112-125, | 274-277; MYRISTYL 85-90; | TYPE2KERATIN 106-114; |
| | | | 1.087; 171-194, 1.127; | CK2_PHOSPHO_SITE 9-12; | SER_RICH 9-77; |
| | | | 39-62, 1.133; 144-167, 1.086; | PKC_PHOSPHO_SITE 77-79; MYRISTYL 93-98; | TYPE1KERATIN 181-194; |
| | | | 69-75, 1.05; | CK2_PHOSPHO_SITE 110-113; | TYPE1KERATIN 202-225; |
| | | | | CK2_PHOSPHO_SITE 249-252; MYRISTYL | TYPE2KERATIN 192-211; |
| | | | | 81-86; PKC_PHOSPHO_SITE 268-270; | filament 103-311; |
| | | | | CK2_PHOSPHO_SITE 117-120; | |
| | | | | CK2_PHOSPHO_SITE 297-300; MYRISTYL | |
| | | | | 80-85; CK2_PHOSPHO_SITE 225-228; | |
| | | | | ASN_GLYCOSYLATION 217-220; MYRISTYL | |
| | | | | 90-95; MYRISTYL 306-311; MYRISTYL | |
| | | | | 67-72; MYRISTYL 62-67; MYRISTYL 86-91; | |
| | | | | PKC_PHOSPHO_SITE 28-30; | |
| | | | | PKC_PHOSPHO_SITE 274-276; MYRISTYL | |
| | | | | 99-104; | |
| DEX0450_033.orf.1 | N | 0 - o1-296; | | PKC_PHOSPHO_SITE 77-79; | filament 103-291; |
| | | | | CK2_PHOSPHO_SITE 277-280; MYRISTYL | TYPE2KERATIN 106-114; |
| | | | | 85-90; MYRISTYL 86-91; MYRISTYL 62-67; | TYPE1KERATIN 181-194; |
| | | | | CK2_PHOSPHO_SITE 110-113; | TYPE2KERATIN 192-211; |
| | | | | CK2_PHOSPHO_SITE 272-275; MYRISTYL | TYPE2KERATIN 178-191; |
| | | | | 80-85; PKC_PHOSPHO_SITE 277-279; | TYPE1KERATIN 202-225; |
| | | | | CK2_PHOSPHO_SITE 225-228; MYRISTYL | SER_RICH 9-77; |
| | | | | 67-72; MYRISTYL 247-252; | |
| | | | | CK2_PHOSPHO_SITE 9-12; MYRISTYL 64-69; | |
| | | | | CK2_PHOSPHO_SITE 257-260; | |
| | | | | MYRISTYL 81-86; ASN_GLYCOSYLATION | |
| | | | | 217-220; MYRISTYL 90-95; MYRISTYL | |
| | | | | 99-104; TYR_PHOSPHO_SITE 238-245; | |
| | | | | MYRISTYL 93-98; CK2_PHOSPHO_SITE | |
| | | | | 117-120; PKC_PHOSPHO_SITE 28-30; | |
| DEX0450_033.aa.2 | N | 0 - o1-267; | 45-51, 1.05; 124-143, 1.086; | MYRISTYL 57-62; ASN_GLYCOSYLATION | TYPE2KERATIN 154-167; |
| | | | 147-154, 1.127; 16-38, 1.133; | 256-259; CK2_PHOSPHO_SITE 93-96; | TYPE2KERATIN 168-187; |
| | | | 222-232, 1.082; 160-167, | MYRISTYL 38-43; MYRISTYL 75-80; | filament 79-266; |
| | | | 1.03; 207-213, 1.068; | ASN_GLYCOSYLATION 193-196; MYRISTYL | TYPE1KERATIN 178-201; |
| | | | 88-101, 1.087; 239-244, | 66-71; PKC_PHOSPHO_SITE 4-6; | TYPE1KERATIN 157-170; |
| | | | 1.085; | MYRISTYL 61-66; CK2_PHOSPHO_SITE 86-89; | TYPE2KERATIN 82-90; |
| | | | | MYRISTYL 56-61; MYRISTYL 62-67; | |
| | | | | CK2_PHOSPHO_SITE 201-204; | |
| | | | | PKC_PHOSPHO_SITE 264-266; MYRISTYL | |
| | | | | 43-48; MYRISTYL 40-45; MYRISTYL 232-237; | |
| | | | | CK2_PHOSPHO_SITE 231-234; | |
| | | | | PKC_PHOSPHO_SITE 53-55; MYRISTYL 69-74; | |
| DEX0450_033.orf.2 | N | 0 - o1-454; | 40-62, 1.133; 324-333, 1.082; | CK2_PHOSPHO_SITE 225-228; | TYPE2KERATIN 178-191; |
| | | | 8-24, 1.263; 231-237, 1.068; | TYR_PHOSPHO_SITE 286-294; MYRISTYL | TYPE2KERATIN 106-114; |
| | | | 246-264, 1.101; 266-273, | 24-29; PKC_PHOSPHO_SITE 336-338; | TYPE1KERATIN 257-277; |
| | | | 1.041; 184-191, 1.03; | ASN_GLYCOSYLATION 7-10; | IF 401-409; |
| | | | 69-75, 1.05; 171-178, 1.127; | CK2_PHOSPHO_SITE 319-322; MYRISTYL | TYPE1KERATIN 329-344; |
| | | | 148-167, 1.086; 112-125, | 86-91; CK2_PHOSPHO_SITE 110-113; | TYPE1KERATIN 355-381; |
| | | | 1.087; 386-402, 1.115; | MYRISTYL 99-104; TYR_PHOSPHO_SITE | filament 103-415; |
| | | | 302-314, 1.096; 363-372, | 396-404; CK2_PHOSPHO_SITE 117-120; | TYPE1KERATIN 181-194; |
| | | | 1.124; 439-445, 1.139; | MYRISTYL 64-69; MYRISTYL 93-98; | TYPE1KERATIN 202-225; |
| | | | 350-359, 1.092; | MYRISTYL 85-90; MYRISTYL 314-319; | TYPE2KERATIN 192-211; |
| | | | | MYRISTYL 380-385; MYRISTYL 80-85; | |
| | | | | ASN_GLYCOSYLATION 217-220; | |
| | | | | PKC_PHOSPHO_SITE 433-435; | |
| | | | | PKC_PHOSPHO_SITE 403-405; | |
| | | | | PKC_PHOSPHO_SITE 347-349; MYRISTYL | |
| | | | | 67-72; MYRISTYL 81-86; | |
| | | | | CK2_PHOSPHO_SITE 347-350; | |
| | | | | ASN_GLYCOSYLATION 447-450; | |
| | | | | PKC_PHOSPHO_SITE 28-30; | |
| | | | | CK2_PHOSPHO_SITE 376-379; | |
| | | | | TYR_PHOSPHO_SITE 349-355; MYRISTYL | |
| | | | | 62-67; PKC_PHOSPHO_SITE 77-79; | |
| | | | | MYRISTYL 90-95; PKC_PHOSPHO_SITE | |
| | | | | 434-436; | |
| DEX0450_034.aa.1 | N | 0 - o1-104; | 5-12, 1.07; 39-46, 1.064; 64-101, | CK2_PHOSPHO_SITE 17-20; | TYPE2KERATIN 3-15; |
| | | | 1.148; | PKC_PHOSPHO_SITE 14-16; | TYPE2KERATIN 48-61; |
| | | | | ASN_GLYCOSYLATION 60-63; MYRISTYL | |
| | | | | 49-54; | |
| DEX0450_035.aa.1 | N | 0 - o1-768; | 496-513, 1.103; 269-281, | MYRISTYL 22-27; MYRISTYL 706-711; | ADENYLTKNASE 603-617; |
| | | | 1.132; 67-77, 1.072; | MYRISTYL 271-276; MYRISTYL 447-452; | SPRY 288-406; ATP_GTP_A |
| | | | 606-611, 1.067; 759-765, | PKC_PHOSPHO_SITE 492-494; | 447-454; GLY_RICH 646-737; |
| | | | 1.083; 419-426, 1.104; | PKC_PHOSPHO_SITE 48-50; | ADENYLTKNASE 444-457; |
| | | | 585-601, 1.125; 618-623, | CAMP_PHOSPHO_SITE 61-64; MYRISTYL | ATP_GTP_A 142-149; |
| | | | 1.045; 439-446, 1.119; | 668-673; CK2_PHOSPHO_SITE 596-599; | SPRY 274-406; SPRY 274-406; |
| | | | 125-136, 1.043; 534-541, | MYRISTYL 368-373; MYRISTYL 686-691; | |
| | | | 1.114; 348-354, 1.125; | MYRISTYL 717-722; PKC_PHOSPHO_SITE | |
| | | | 214-219, 1.076; 521-530, | 709-711; PKC_PHOSPHO_SITE 560-562; | |
| | | | 1.068; 152-164, 1.163; | ASN_GLYCOSYLATION 582-585; | |
| | | | 692-704, 1.1; 572-578, 1.138; | CK2_PHOSPHO_SITE 584-587; | |
| | | | 359-365, 1.093; 407-417, | PKC_PHOSPHO_SITE 633-635; | |
| | | | 1.075; 284-297, 1.141; | CK2_PHOSPHO_SITE 475-478; | |
| | | | 544-553, 1.231; 10-21, 1.128; | ASN_GLYCOSYLATION 636-639; MYRISTYL | |
| | | | 321-335, 1.08; 27-46, 1.178; | 664-669; MYRISTYL 164-169; | |
| | | | 299-305, 1.062; 227-244, | PKC_PHOSPHO_SITE 638-640; MYRISTYL | |
| | | | 1.195; 48-54, 1.032; | 328-333; MYRISTYL 751-756; | |
| | | | 370-401, 1.222; | ASN_GLYCOSYLATION 526-529; MYRISTYL | |
| | | | | 3-8; MYRISTYL 665-670; | |
| | | | | ASN_GLYCOSYLATION 740-743; MYRISTYL | |
| | | | | 733-738; CK2_PHOSPHO_SITE 90-93; | |
| | | | | MYRISTYL 25-30; MYRISTYL 629-634; | |
| | | | | MYRISTYL 312-317; PKC_PHOSPHO_SITE | |
| | | | | 616-618; MYRISTYL 168-173; MYRISTYL | |
| | | | | 647-652; MYRISTYL 683-688; | |
| | | | | PKC_PHOSPHO_SITE 76-78; | |
| | | | | PKC_PHOSPHO_SITE 325-327; MYRISTYL | |
| | | | | 687-692; MYRISTYL 660-665; | |
| | | | | PKC_PHOSPHO_SITE 630-632; MYRISTYL | |
| | | | | 685-690; MYRISTYL 265-270; | |
| | | | | PKC_PHOSPHO_SITE 284-286; MYRISTYL | |
| | | | | 450-455; MYRISTYL 684-689; | |
| | | | | PKC_PHOSPHO_SITE 81-83; | |
| DEX0450_035.orf.1 | N | 0 - o1-793; | 236-244, 1.076; 294-306, | MYRISTYL 50-55; MYRISTYL 353-358; | ADENYLTKNASE 628-642; |
| | | | 1.132; 373-379, 1.125; | MYRISTYL 393-398; MYRISTYL 776-781; | GLY_RICH 671-762; SPRY |
| | | | 36-44, 1.103; 631-636, 1.067; | PKC_PHOSPHO_SITE 106-108; | 299-431; SPRY 299-431; |
| | | | 252-269, 1.195; 546-556, | PKC_PHOSPHO_SITE 517-519; | SPRY 313-431; |
| | | | 1.068; 643-648, 1.045; | PKC_PHOSPHO_SITE 655-657; | ADENYLTKNASE 469-482; |
| | | | 395-426, 1.222; 464-471, | PKC_PHOSPHO_SITE 350-352; | ATP_GTP_A 472-479; |
| | | | 1.119; 559-566, 1.114; | CK2_PHOSPHO_SITE 621-624; | ATP_GTP_A 167-174; |
| | | | 717-729, 1.1; 73-79, 1.032; | ASN_GLYCOSYLATION 607-610; MYRISTYL | |
| | | | 569-578, 1.231; 444-452, | 21-26; MYRISTYL 689-694; MYRISTYL | |
| | | | 1.104; 521-538, 1.103; | 15-20; PKC_PHOSPHO_SITE 734-736; | |
| | | | 4-15, 1.069; 52-71, 1.178; | MYRISTYL 25-30; MYRISTYL 193-198; | |
| | | | 324-332, 1.062; 150-161, | MYRISTYL 709-714; CAMP_PHOSPHO_SITE | |
| | | | 1.043; 597-604, 1.138; | 86-89; MYRISTYL 742-747; | |
| | | | 610-626, 1.125; 384-390, | ASN_GLYCOSYLATION 551-554; MYRISTYL | |
| | | | 1.093; 346-360, 1.08; | 290-295; MYRISTYL 685-690; | |
| | | | 309-322, 1.141; 784-790, | PKC_PHOSPHO_SITE 663-665; MYRISTYL | |
| | | | 1.083; 92-102, 1.072; | 711-716; ASN_GLYCOSYLATION 765-768; | |
| | | | 177-189, 1.163; 432-442, | MYRISTYL 731-736; MYRISTYL 693-698; | |
| | | | 1.075; | MYRISTYL 189-194; CK2_PHOSPHO_SITE | |
| | | | | 609-612; MYRISTYL 758-763; MYRISTYL | |
| | | | | 690-695; PKC_PHOSPHO_SITE 101-103; | |
| | | | | ASN_GLYCOSYLATION 661-664; MYRISTYL | |
| | | | | 710-715; PKC_PHOSPHO_SITE 309-311; | |
| | | | | MYRISTYL 708-713; CK2_PHOSPHO_SITE | |
| | | | | 500-503; MYRISTYL 337-342; MYRISTYL | |
| | | | | 712-717; PKC_PHOSPHO_SITE 585-587; | |
| | | | | MYRISTYL 7-12; MYRISTYL 672-677; | |
| | | | | CK2_PHOSPHO_SITE 115-118; MYRISTYL | |
| | | | | 472-477; MYRISTYL 654-659; MYRISTYL | |
| | | | | 296-301; PKC_PHOSPHO_SITE 658-660; | |
| | | | | MYRISTYL 475-480; PKC_PHOSPHO_SITE | |
| | | | | 73-75; PKC_PHOSPHO_SITE 641-643; | |
| DEX0450_036.aa.1 | N | 0 - o1-325; | 152-159, 1.096; 4-38, 1.178; | TYR_PHOSPHO_SITE 102-110; | sp_P34932_HS74_HUMAN |
| | | | 105-128, 1.122; 188-198, | PKC_PHOSPHO_SITE 276-278; | 198-269; |
| | | | 1.097; 262-277, 1.145, | ASN_GLYCOSYLATION 260-263; | sp_Q92598_H105_HUMAN |
| | | | 165-174, 1.106; 242-250, | CK2_PHOSPHO_SITE 221-224; | 42-169; |
| | | | 1.118; 55-76, 1.156; | TYR_PHOSPHO_SITE 201-207; | |
| | | | 219-224, 1.06; | CK2_PHOSPHO_SITE 137-140; | |
| | | | | CK2_PHOSPHO_SITE 13-16; | |
| DEX0450_037.aa.1 | N | 0 —i1-131; | 47-70, 1.153; 73-84, 1.132; | CK2_PHOSPHO_SITE 56-59; | sp_P18758_TYB4_XENLA |
| | | | 26-41, 1.214; 10-20, 1.057; | PKC_PHOSPHO_SITE 89-91; | 94-131; THY 94-130; |
| | | | | CK2_PHOSPHO_SITE 87-90; | THYMOSIN_B4 105-116; |
| | | | | CK2_PHOSPHO_SITE 12-15; | Thymosin 89-129; |
| | | | | PKC_PHOSPHO_SITE 80-82; | |
| DEX0450_037.orf.1 | N | 0 - o1-116; | 11-26, 1.214; 32-55, 1.153; | CK2_PHOSPHO_SITE 41-44; | THYMOSIN_B4 90-101; |
| | | | 58-69, 1.132; | PKC_PHOSPHO_SITE 1-3; | sp_P18758_TYB4_XENLA |
| | | | | PKC_PHOSPHO_SITE 65-67; | 79-116; Thymosin 74-114; |
| | | | | CK2_PHOSPHO_SITE 72-75; | THY 79-115; |
| | | | | PKC_PHOSPHO_SITE 74-76; | |
| DEX0450_038.aa.1 | N | 0 - o1-63; | 33-46, 1.084; 16-25, 1.113; | CK2_PHOSPHO_SITE 47-50; | |
| | | | 4-11; 1.205; 48-60, 1.193; | PKC_PHOSPHO_SITE 7-9; | |
| DEX0450_038.orf.1 | N | 0 - o1-97; | 4-27, 1.171; 32-47, 1.134; | | |
| | | | 49-59, 1.215; | | |
| DEX0450_039.aa.1 | N | 0 - o1-163; | 106-113, 1.134; 120-132, | PKC_PHOSPHO_SITE 50-52; | Clathrin_lg_ch 1-145; |
| | | | 1.156; 134-160, 1.207; | TYR_PHOSPHO_SITE 63-69; | sp_P09496_CLCA_HUMAN 1-123; |
| | | | 15-25, 1.122; | CK2_PHOSPHO_SITE 27-30; | |
| | | | | CK2_PHOSPHO_SITE 20-23; | |
| | | | | PKC_PHOSPHO_SITE 116-118; | |
| | | | | CK2_PHOSPHO_SITE 101-104; | |
| | | | | PKC_PHOSPHO_SITE 31-33; | |
| | | | | PKC_PHOSPHO_SITE 134-136; | |
| DEX0450_039.orf.1 | Y | 0 - o1-283; | 227-234, 1.134; 75-82, 1.094; | MYRISTYL 113-118; CK2_PHOSPHO_SITE | CLATHRIN_LIGHT_CHN_2 |
| | | | 25-44, 1.186; 5-22, 1.155; | 222-225; PKC_PHOSPHO_SITE 253-255; | 242-255; |
| | | | 95-100, 1.052; 247-257, | MYRISTYL 3-8; CK2_PHOSPHO_SITE 141-144; | sp_P09496_CLCA_HUMAN |
| | | | 1.142; 263-280, 1.207; | MYRISTYL 120-125; MYRISTYL 23-28; | 71-257; Clathrin_lg_ch |
| | | | 136-146, 1.122; 47-55, 1.039; | PKC_PHOSPHO_SITE 171-173; | 46-260; |
| | | | | MYRISTYL 63-68; CK2_PHOSPHO_SITE | CLATHRIN_LIGHT_CHN_1 |
| | | | | 148-151; MYRISTYL 51-56; MYRISTYL | 78-84; |
| | | | | 25-30; PKC_PHOSPHO_SITE 152-154; | |
| | | | | TYR_PHOSPHO_SITE 184-190; | |
| | | | | PKC_PHOSPHO_SITE 237-239; MYRISTYL | |
| | | | | 65-70; | |
| DEX0450_039.aa.2 | N | 0 - o1-222; | 82-93, 1.122; 174-181, 1.134; | ASN_GLYCOSYLATION 216-219; MYRISTYL | sp_P09496_CLCA_HUMAN |
| | | | 52-58, 1.052; 32-41, 1.094, | 8-13; PKC_PHOSPHO_SITE 202-204; | 28-191; |
| | | | 4-12, 1.039; 188-202, 1.156; | PKC_PHOSPHO_SITE 68-70; MYRISTYL | CLATHRIN_LIGHT_CHN_1 |
| | | | | 215-220; TYR_PHOSPHO_SITE 131-137; | 35-41; Clathrin_lg_ch |
| | | | | CK2_PHOSPHO_SITE 88-91; MYRISTYL 22-27; | 3-203; |
| | | | | PKC_PHOSPHO_SITE 99-101; | |
| | | | | PKC_PHOSPHO_SITE 184-186; | |
| | | | | CK2_PHOSPHO_SITE 95-98; MYRISTYL 20-25; | |
| | | | | CK2_PHOSPHO_SITE 169-172; | |
| | | | | PKC_PHOSPHO_SITE 118-120; | |
| DEX0450_039.orf.2 | y | 0 - o1-250; | 125-135, 1.122; 216-223, | PKC_PHOSPHO_SITE 226-228; | CLATHRIN_LIGHT_CHN_2 |
| | | | 1.134; 236-247, 1.142; | PKC_PHOSPHO_SITE 78-80; | 231-244; Clathrin_lg_ch |
| | | | 5-14, 1.175; 16-61, 1.224; | PKC_PHOSPHO_SITE 110-112; | 49-249; |
| | | | | TYR_PHOSPHO_SITE 173-179; | sp_P09496_CLCA_HUMAN |
| | | | | CK2_PHOSPHO_SITE 137-140; | 94-248; |
| | | | | PKC_PHOSPHO_SITE 81-83; | |
| | | | | PKC_PHOSPHO_SITE 141-143; | |
| | | | | CK2_PHOSPHO_SITE 130-133; | |
| | | | | CK2_PHOSPHO_SITE 211-214; | |
| | | | | PKC_PHOSPHO_SITE 160-162; | |
| | | | | ASN_GLYCOSYLATION 1-4; | |
| | | | | PKC_PHOSPHO_SITE 242-244; | |
| | | | | PKC_PHOSPHO_SITE 91-93; | |
| DEX0450_039.aa.3 | N | 0 —i1-142; | 127-134, 1.06; 86-93, 1.094; | MYRISTYL 62-67; AMIDATION 137-140; | CLATHRIN_LIGHT_CHN_1 |
| | | | 16-33, 1.186; 106-112, 1.052; | PKC_PHOSPHO_SITE 133-135; | 89-95; |
| | | | 58-66, 1.039; 36-55, 1.186; | CAMP_PHOSPHO_SITE 134-137; | sp_P08081_CLCA_RAT 82-117; |
| | | | | PKC_PHOSPHO_SITE 137-139; MYRISTYL | |
| | | | | 76-81; MYRISTYL 34-39; | |
| | | | | PKC_PHOSPHO_SITE 1-3; MYRISTYL 74-79; | |
| | | | | MYRISTYL 36-41; PKC_PHOSPHO_SITE | |
| | | | | 122-124; | |
| DEX0450_039.orf.3 | N | 0 - o1-220; | 36-55, 1.186; 106-111, 1.052; | CK2_PHOSPHO_SITE 181-184; MYRISTYL | sp_O08585_CLCA_MOUSE |
| | | | 16-33, 1.186; 58-66, 1.039; | 62-67; TYR_PHOSPHO_SITE 143-149; | 127-218; |
| | | | 86-93, 1.094; 186-193, 1.134; | PKC_PHOSPHO_SITE 196-198; MYRISTYL | CLATHRIN_LIGHT_CHN_1 |
| | | | 206-217, 1.142; | 34-39; MYRISTYL 124-129; | 89-95; |
| | | | | PKC_PHOSPHO_SITE 212-214; | CLATHRIN_LIGHT_CHN_2 |
| | | | | PKC_PHOSPHO_SITE 130-132; MYRISTYL | 201-214; Clathrin_lg_ch |
| | | | | 36-41; MYRISTYL 76-81; MYRISTYL 74-79; | 57-219; |
| | | | | PKC_PHOSPHO_SITE 1-3; | |
| DEX0450_039.aa.4 | N | 0 - o1-111; | 87-105, 1.126; 14-25, 1.122; | CK2_PHOSPHO_SITE 20-23; | sp_P09496_CLCA_HUMAN 1-102; |
| | | | | CK2_PHOSPHO_SITE 27-30; | Clathrin_lg_ch 1-111; |
| | | | | PKC_PHOSPHO_SITE 105-107; | |
| | | | | TYR_PHOSPHO_SITE 63-69; | |
| | | | | PKC_PHOSPHO_SITE 50-52; | |
| | | | | TYR_PHOSPHO_SITE 84-91; | |
| | | | | PKC_PHOSPHO_SITE 31-33; MYRISTYL | |
| DEX0450_039.orf.4 | Y | 0 - o1-236; | 29-48, 1.186; 5-26, 1.186; | TYR_PHOSPHO_SITE 188-194; | Clathrin_lg_ch 50-236; |
| | | | 216-230, 1.126; 79-86, 1.094; | PKC_PHOSPHO_SITE 230-232; MYRISTYL | sp_P09496_CLCA_HUMAN |
| | | | 99-104, 1.052; 51-59, 1.039; | 29-34; MYRISTYL 69-74; | 75-227; |
| | | | 140-150, 1.122; | TYR_PHOSPHO_SITE 209-216; MYRISTYL | CLATHRIN_LIGHT_CHN_1 |
| | | | | 124-129; CK2_PHOSPHO_SITE 145-148; | 82-88; |
| | | | | MYRISTYL 229-234; PKC_PHOSPHO_SITE | |
| | | | | 156-158; MYRISTYL 117-122; MYRISTYL | |
| | | | | 27-32; CK2_PHOSPHO_SITE 152-155; | |
| | | | | PKC_PHOSPHO_SITE 175-177; MYRISTYL | |
| | | | | 55-60; MYRISTYL 67-72; | |
| DEX0450_039.aa.5 | N | 0 - o1-211; | 146-178, 1.243; 201-208, | MYRISTYL 203-208; CK2_PHOSPHO_SITE | Clathrin_lg_ch 1-135; |
| | | | 1.162; 120-132, 1.156; | 101-104; PKC_PHOSPHO_SITE 50-52; | sp_P09496_CLCA_HUMAN 1-123; |
| | | | 106-113, 1.134; 15-25, 1.122; | AMIDATION 181-184; CK2_PHOSPHO_SITE | |
| | | | | 27-30; PKC_PHOSPHO_SITE 134-136; | |
| | | | | AMIDATION 184-187; CK2_PHOSPHO_SITE | |
| | | | | 20-23; PKC_PHOSPHO_SITE 116-118; | |
| | | | | PKC_PHOSPHO_SITE 31-33; AMIDATION | |
| | | | | 195-198; TYR_PHOSPHO_SITE 63-69; | |
| | | | | PKC_PHOSPHO_SITE 181-183; | |
| DEX0450_039.orf.5 | Y | 0 - o1-263; | | MYRISTYL 27-32; PKC_PHOSPHO_SITE | CLATHRIN_LIGHT_CHN_1 |
| | | | | 156-158; MYRISTYL 69-74; MYRISTYL | 82-88; |
| | | | | 29-34; CK2_PHOSPHO_SITE 152-155; | CLATHRIN_LIGHT_CHN_2 |
| | | | | PKC_PHOSPHO_SITE 241-243; | 246-259; |
| | | | | MICROBODIES_CTER 261-263; | sp_P09496_CLCA_HUMAN |
| | | | | CK2_PHOSPHO_SITE 226-229; MYRISTYL | 75-261; Clathrin_lg_ch |
| | | | | 55-60; MYRISTYL 124-129; | 50-261; |
| | | | | PKC_PHOSPHO_SITE 175-177; | |
| | | | | TYR_PHOSPHO_SITE 188-194; MYRISTYL | |
| | | | | 67-72; MYRISTYL 117-122; | |
| | | | | PKC_PHOSPHO_SITE 257-259; | |
| | | | | CK2_PHOSPHO_SITE 145-148; | |
| DEX0450_039.aa.6 | N | 0 - o1-150; | 119-127, 1.056; 132-147, | PKC_PHOSPHO_SITE 50-52; | Clathrin_lg_ch 1-145; |
| | | | 1.204; 15-25, 1.122; | PKC_PHOSPHO_SITE 131-133; | sp_P09496_CLCA_HUMAN 1-121; |
| | | | 106-113, 1.134; | PKC_PHOSPHO_SITE 116-118; | |
| | | | | CK2_PHOSPHO_SITE 27-30; | |
| | | | | CK2_PHOSPHO_SITE 101-104; | |
| | | | | PKC_PHOSPHO_SITE 117-119; | |
| | | | | TYR_PHOSPHO_SITE 63-69; | |
| | | | | PKC_PHOSPHO_SITE 130-132; | |
| | | | | CK2_PHOSPHO_SITE 20-23; | |
| | | | | PKC_PHOSPHO_SITE 31-33; | |
| DEX0450_039.orf.6 | Y | 0 - o1-269; | 29-48, 1.186; 244-254, 1.069; | TYR_PHOSPHO_SITE 188-194; MYRISTYL | Clathrin_lg_ch 50-261; |
| | | | 257-266, 1.185; 79-86, 1.094; | 55-60; PKC_PHOSPHO_SITE 241-243; | sp_P09496_CLCA_HUMAN |
| | | | 99-104, 1.052; 51-59, 1.039; | MYRISTYL 117-122; PKC_PHOSPHO_SITE | 75-246; |
| | | | 231-238, 1.134; 5-26, 1.186; | 156-158; MYRISTYL 69-74; | CLATHRIN_LIGHT_CHN_1 |
| | | | 140-150, 1.122; | CK2_PHOSPHO_SITE 226-229; MYRISTYL | 82-88; |
| | | | | 67-72; PKC_PHOSPHO_SITE 255-257; | |
| | | | | MYRISTYL 124-129; CK2_PHOSPHO_SITE | |
| | | | | 152-155; PKC_PHOSPHO_SITE 175-177; | |
| | | | | CK2_PHOSPHO_SITE 145-148; MYRISTYL | |
| | | | | 27-32; PKC_PHOSPHO_SITE 242-244; | |
| | | | | MYRISTYL 29-34; PKC_PHOSPHO_SITE | |
| | | | | 256-258; | |
| DEX0450_040.aa.1 | Y | 0 - o1-152; | 131-149, 1.148; 108-121, | MYRISTYL 40-45; PKC_PHOSPHO_SITE 29-31; | LYSOZYME 20-38; LYZLACT |
| | | | 1.158; 4-30, 1.234; 72-78, | MYRISTYL 90-95; | 21-31; LYZLACT 123-134; |
| | | | 1.044; 89-105, 1.181; 45-51, | | LYSOZYME 89-99; LYZLACT |
| | | | 1.067; | | 69-85; LACTALBUMIN 122-131; |
| | | | | | LYSOZYME 100-115; |
| | | | | | LACTALBUMIN 100-111; |
| | | | | | LYSOZYME 122-131; |
| | | | | | LACTALBUMIN_LYSOZYME |
| | | | | | 95-113; LACTALBUMIN 27-47; |
| | | | | | LYZ1 19-143; |
| | | | | | LYZLACT 41-50; lys 19-142; |
| | | | | | LYZLACT 93-102; |
| | | | | | LYSOZYME 51-63; LYZLACT |
| | | | | | 103-118; |
| DEX0450_041.aa.1 | N | 5 - o1-28; | 141-175, 1.216; 58-105, | CAMP_PHOSPHO_SITE 172-175; MYRISTYL | ERLUMENR 122-140; |
| | | tm29-46; | 1.201; 113-131, 1.153; | 150-155; MYRISTYL 14-19; | ERLUMENR 150-165; |
| | | i47-57; | 15-49, 1.224; | CK2_PHOSPHO_SITE 80-83; MYRISTYL | ER_lumen_recept 31-168; |
| | | tm58-75; | | 122-127; AMIDATION 170-173; | sp_O99JH8_O99JH8_MOUSE |
| | | o76-84; | | PKC_PHOSPHO_SITE 58-60; MYRISTYL 9-14; | 71-178; ERLUMENR 86-106; |
| | | tm85-104; | | MYRISTYL 54-59; | ER_LUMEN_RECEPTOR_2 92-101; |
| | | i105-116; | | | ERLUMENR 108-122; |
| | | tm117-134; | | | |
| | | o135-143; | | | |
| | | tm144-166; | | | |
| | | i167-178; | | | |
| DEX0450_041.orf.1 | N | 0 - o1-183; | 76-90, 1.167; 126-147, 1.158; | PKC_PHOSPHO_SITE 90-92; | |
| | | | 36-73, 1.211; 7-26, 1.168; | PKC_PHOSPHO_SITE 113-115; | |
| | | | 162-172, 1.186; 98-112, | CK2_PHOSPHO_SITE 151-154; | |
| | | | 1.187; | | |
| DEX0450_042.aa.1 | N | 0 - o1-742; | 144-163, 1.095; 6-21, 1.176; | PKC_PHOSPHO_SITE 625-627; | PRICHEXTENSN 189-201; |
| | | | 104-119, 1.109; 238-300, | PKC_PHOSPHO_SITE 426-428; MYRISTYL | HISTONEH5 708-727; |
| | | | 1.255; 187-196, 1.107; | 723-728; CK2_PHOSPHO_SITE 91-94; | PRICHEXTENSN 328-345; |
| | | | 530-544, 1.055; 47-57, 1.112; | ASN_GLYCOSYLATION 46-49; | TREACLE 364-377; |
| | | | 200-209, 1.03; 384-391, | CK2_PHOSPHO_SITE 49-52; MYRISTYL | PRICHEXTENSN 420-445; |
| | | | 1.114; 353-364, 1.092; | 270-275; MYRISTYL 727-732; | SER_RICH_2 364-569; |
| | | | 643-649, 1.039; 394-399, | PKC_PHOSPHO_SITE 712-714; | SER_RICH_1 217-231; |
| | | | 1.026; 217-225, 1.027; | CK2_PHOSPHO_SITE 564-567; | TREACLE 158-176; |
| | | | 61-68, 1.052; 27-33, 1.05; | CK2_PHOSPHO_SITE 512-515; | TREACLE 385-408; |
| | | | 493-505, 1.11; 615-624, | CK2_PHOSPHO_SITE 176-179; | SRP40_C 644-739; |
| | | | 1.174; 331-345, 1.109; | PKC_PHOSPHO_SITE 61-63; | HISTONEH5 612-636; |
| | | | 729-737, 1.119; 433-462, | CK2_PHOSPHO_SITE 368-371; | HISTONEH5 547-568; |
| | | | 1.09; 72-78, 1.061; 702-707, | PKC_PHOSPHO_SITE 487-489; | |
| | | | 1.073; | PKC_PHOSPHO_SITE 192-194; MYRISTYL | |
| | | | | 508-513; PKC_PHOSPHO_SITE 724-726; | |
| | | | | CK2_PHOSPHO_SITE 404-407; | |
| | | | | CK2_PHOSPHO_SITE 314-317; MYRISTYL | |
| | | | | 114-119; CAMP_PHOSPHO_SITE 662-665; | |
| | | | | PKC_PHOSPHO_SITE 493-495; | |
| | | | | CK2_PHOSPHO_SITE 86-89; | |
| | | | | PKC_PHOSPHO_SITE 551-553; | |
| | | | | CK2_PHOSPHO_SITE 606-609; | |
| | | | | CK2_PHOSPHO_SITE 41-44; | |
| | | | | PKC_PHOSPHO_SITE 481-483; | |
| | | | | CAMP_PHOSPHO_SITE 305-308; | |
| | | | | CK2_PHOSPHO_SITE 315-318; | |
| | | | | CK2_PHOSPHO_SITE 133-136; | |
| | | | | ASN_GLYCOSYLATION 561-564; | |
| | | | | PKC_PHOSPHO_SITE 304-306; | |
| | | | | CK2_PHOSPHO_SITE 313-316; | |
| | | | | CK2_PHOSPHO_SITE 274-277; MYRISTYL | |
| | | | | 267-272; CK2_PHOSPHO_SITE 231-234; | |
| | | | | CK2_PHOSPHO_SITE 467-470; | |
| | | | | PKC_PHOSPHO_SITE 437-439; | |
| | | | | CK2_PHOSPHO_SITE 226-229; | |
| | | | | CK2_PHOSPHO_SITE 563-566; | |
| | | | | CK2_PHOSPHO_SITE 376-379; | |
| | | | | CK2_PHOSPHO_SITE 476-479; | |
| | | | | ASN_GLYCOSYLATION 590-593; | |
| | | | | PKC_PHOSPHO_SITE 392-394; | |
| | | | | CK2_PHOSPHO_SITE 375-378; | |
| | | | | CK2_PHOSPHO_SITE 227-230; | |
| | | | | CK2_PHOSPHO_SITE 519-522; | |
| | | | | CK2_PHOSPHO_SITE 521-524; | |
| | | | | CK2_PHOSPHO_SITE 174-177; | |
| | | | | CAMP_PHOSPHO_SITE 721-724; | |
| | | | | CK2_PHOSPHO_SITE 175-178; | |
| | | | | CK2_PHOSPHO_SITE 514-517; | |
| | | | | CK2_PHOSPHO_SITE 413-416; | |
| | | | | CK2_PHOSPHO_SITE 168-171; | |
| | | | | ASN_GLYCOSYLATION 59-62; | |
| | | | | CK2_PHOSPHO_SITE 309-312; | |
| | | | | PKC_PHOSPHO_SITE 431-433; | |
| | | | | CK2_PHOSPHO_SITE 84-87; | |
| | | | | CK2_PHOSPHO_SITE 520-523; | |
| | | | | PKC_PHOSPHO_SITE 248-250; | |
| | | | | PKC_PHOSPHO_SITE 461-463; MYRISTYL | |
| | | | | 425-430; PKC_PHOSPHO_SITE 239-241; | |
| | | | | CK2_PHOSPHO_SITE 128-131; | |
| | | | | CAMP_PHOSPHO_SITE 81-84; | |
| | | | | CK2_PHOSPHO_SITE 364-367; | |
| | | | | PKC_PHOSPHO_SITE 528-530; | |
| | | | | CK2_PHOSPHO_SITE 409-412; | |
| | | | | CK2_PHOSPHO_SITE 134-137; | |
| | | | | CK2_PHOSPHO_SITE 469-472; | |
| | | | | ASN_GLYCOSYLATION 429-432; | |
| | | | | CK2_PHOSPHO_SITE 475-478; | |
| | | | | CK2_PHOSPHO_SITE 569-572; | |
| | | | | CK2_PHOSPHO_SITE 170-173; | |
| | | | | CK2_PHOSPHO_SITE 474-477; MYRISTYL | |
| | | | | 543-548; CK2_PHOSPHO_SITE 92-95; | |
| | | | | PKC_PHOSPHO_SITE 718-720; | |
| | | | | CK2_PHOSPHO_SITE 414-417; | |
| | | | | CK2_PHOSPHO_SITE 308-311; | |
| | | | | CK2_PHOSPHO_SITE 129-132; | |
| | | | | CK2_PHOSPHO_SITE 374-377; | |
| | | | | PKC_PHOSPHO_SITE 581-583; | |
| | | | | PKC_PHOSPHO_SITE 736-738; | |
| | | | | CK2_PHOSPHO_SITE 568-571; | |
| | | | | CK2_PHOSPHO_SITE 468-471; | |
| DEX0450_042.aa.2 | N | 0 - o1-288; | 4-10, 1.142; 189-195, 1.039; | CAMP_PHOSPHO_SITE 208-211; | HISTONEH5 254-273; |
| | | | 248-253, 1.073; 211-216, | PKC_PHOSPHO_SITE 74-76; MYRISTYL 89-94; | HISTONEH5 192-206; |
| | | | 1.044; 273-283, 1.119; | CK2_PHOSPHO_SITE 58-61; | HISTONEH5 93-114; |
| | | | 161-170, 1.174; 18-48, 1.145; | CK2_PHOSPHO_SITE 110-113; | HISTONEH5 158-182; |
| | | | 76-90, 1.055; 92-97, 1.037; | ASN_GLYCOSYLATION 136-139; | SRP40_C 190-285; |
| | | | | CK2_PHOSPHO_SITE 13-16; | SER_RICH 40-115; |
| | | | | CK2_PHOSPHO_SITE 60-63; | |
| | | | | PKC_PHOSPHO_SITE 127-129; | |
| | | | | CK2_PHOSPHO_SITE 48-51; | |
| | | | | PKC_PHOSPHO_SITE 282-284; | |
| | | | | CK2_PHOSPHO_SITE 46-49; | |
| | | | | PKC_PHOSPHO_SITE 270-272; | |
| | | | | PKC_PHOSPHO_SITE 264-266; | |
| | | | | CK2_PHOSPHO_SITE 114-117; | |
| | | | | CK2_PHOSPHO_SITE 109-112; MYRISTYL | |
| | | | | 273-278; PKC_PHOSPHO_SITE 258-260; | |
| | | | | CK2_PHOSPHO_SITE 66-69; MYRISTYL 55-60; | |
| | | | | PKC_PHOSPHO_SITE 171-173; | |
| | | | | CK2_PHOSPHO_SITE 152-155; | |
| | | | | ASN_GLYCOSYLATION 107-110; | |
| | | | | CK2_PHOSPHO_SITE 115-118; | |
| | | | | CK2_PHOSPHO_SITE 65-68; | |
| | | | | PKC_PHOSPHO_SITE 97-99; | |
| | | | | CAMP_PHOSPHO_SITE 267-270; MYRISTYL | |
| | | | | 269-274; CK2_PHOSPHO_SITE 67-70; | |
| DEX0450_042.orf.2 | N | 0 - o1-265; | 53-67, 1.055; 188-193, 1.044; | MYRISTYL 246-251; PKC_PHOSPHO_SITE | SRP40_C 167-262; |
| | | | 4-25, 1.145; 166-172, 1.039; | 259-261; PKC_PHOSPHO_SITE 235-237; | HISTONEH5 135-159; |
| | | | 30-36, 1.049; 69-75, 1.037; | PKC_PHOSPHO_SITE 51-53; | HISTONEH5 231-250; |
| | | | 250-260, 1.119; 138-148, | PKC_PHOSPHO_SITE 241-243; | HISTONEH5 169-183; |
| | | | 1.174; 225-231, 1.073; | CK2_PHOSPHO_SITE 91-94; | HISTONEH5 70-91; |
| | | | | PKC_PHOSPHO_SITE 247-249; MYRISTYL | SER_RICH 17-92; |
| | | | | 66-71; CK2_PHOSPHO_SITE 92-95; | |
| | | | | CK2_PHOSPHO_SITE 25-28; MYRISTYL 32-37; | |
| | | | | CK2_PHOSPHO_SITE 129-132; | |
| | | | | CK2_PHOSPHO_SITE 42-45; | |
| | | | | PKC_PHOSPHO_SITE 74-76; | |
| | | | | CK2_PHOSPHO_SITE 35-38; | |
| | | | | ASN_GLYCOSYLATION 113-116; | |
| | | | | CK2_PHOSPHO_SITE 87-90; | |
| | | | | ASN_GLYCOSYLATION 84-87; MYRISTYL | |
| | | | | 250-255; CK2_PHOSPHO_SITE 37-40; | |
| | | | | CAMP_PHOSPHO_SITE 244-247; | |
| | | | | CK2_PHOSPHO_SITE 2-5; | |
| | | | | CK2_PHOSPHO_SITE 44-47; | |
| | | | | PKC_PHOSPHO_SITE 104-106; | |
| | | | | CK2_PHOSPHO_SITE 43-46; | |
| | | | | PKC_PHOSPHO_SITE 148-150; | |
| | | | | CK2_PHOSPHO_SITE 86-89; | |
| | | | | CK2_PHOSPHO_SITE 23-26; | |
| | | | | CAMP_PHOSPHO_SITE 185-188; | |
| DEX0450_043.aa.1 | N | 6 - o1-341; | 400-406, 1.115; 338-369, | CK2_PHOSPHO_SITE 670-673; | |
| | | tm342-364; | 1.239; 88-110, 1.146; | CK2_PHOSPHO_SITE 853-856; | |
| | | i365-467; | 588-593, 1.048; 1145-1158, | PKC_PHOSPHO_SITE 133-135; | |
| | | tm468-490; | 1.115; 790-818, 1.196; | PKC_PHOSPHO_SITE 695-697; MYRISTYL | |
| | | o491-518; | 1116-1138, 1.163; 55-63, | 24-29; ASN_GLYCOSYLATION 131-134; | |
| | | tm519-541; | 1.089; 720-735, 1.157; | CK2_PHOSPHO_SITE 227-230; | |
| | | i542-552; | 1002-1016, 1.101; 1175-1218, | CK2_PHOSPHO_SITE 369-372; | |
| | | tm553-571; | 1.159; 256-266, 1.095; | CK2_PHOSPHO_SITE 459-462; MYRISTYL | |
| | | o572-625; | 268-301, 1.237; 188-205, | 142-147; PKC_PHOSPHO_SITE 368-370; | |
| | | tm626-648; | 1.179; 529-546, 1.156; | CK2_PHOSPHO_SITE 373-376; MYRISTYL | |
| | | i649-652; | 854-876, 1.095; 612-659, | 707-712; ASN_GLYCOSYLATION 375-378; | |
| | | tm653-675; | 1.215; 235-253, 1.121; | CK2_PHOSPHO_SITE 146-149; MYRISTYL | |
| | | o676-1276; | 946-951, 1.1; 464-506, 1.236; | 1017-1022; PKC_PHOSPHO_SITE 952-954; | |
| | | | 129-148, 1.164; 509-523, | PKC_PHOSPHO_SITE 677-679; | |
| | | | 1.086; 889-896, 1.088; | PKC_PHOSPHO_SITE 1090-1092; | |
| | | | 898-932, 1.166; 415-457, | CK2_PHOSPHO_SITE 837-840; MYRISTYL | |
| | | | 1.183; 578-585, 1.166; | 1170-1175; CAMP_PHOSPHO_SITE 957-960; | |
| | | | 825-845, 1.13; 30-50, 1.175; | PKC_PHOSPHO_SITE 960-962; | |
| | | | 306-315, 1.184; 19-26, 1.081; | PKC_PHOSPHO_SITE 889-891; | |
| | | | 1096-1109, 1.131; 217-229, | ASN_GLYCOSYLATION 932-935; | |
| | | | 1.175; 1221-1228, 1.117; | PKC_PHOSPHO_SITE 286-288; MYRISTYL | |
| | | | 1052-1087, 1.186; 150-158, | 691-696; CK2_PHOSPHO_SITE 215-218; | |
| | | | 1.126; 4-9, 1.162; 978-1000, | PKC_PHOSPHO_SITE 955-957; | |
| | | | 1.174; 961-968, 1.082; | PKC_PHOSPHO_SITE 682-684; | |
| | | | 663-675, 1.207; 743-774, | ASN_GLYCOSYLATION 323-326; | |
| | | | 1.125; 1021-1037, 1.137; | ASN_GLYCOSYLATION 690-693; MYRISTYL | |
| | | | 73-81, 1.18; 1258-1265, | 428-433; ASN_GLYCOSYLATION 190-193; | |
| | | | 1.058; 700-709, 1.094; | | |
| | | | 112-127, 1.127; 552-572, | | |
| | | | 1.144; | | |
| DEX0450_043.orf.1 | Y | 1 —i1-8; | 254-288, 1.166; 19-31, 1.207; | PKC_PHOSPHO_SITE 6-8; | |
| | | tm9-31; | 4-15, 1.144; 99-130, 1.125; | PKC_PHOSPHO_SITE 446-448; | |
| | | o32-632; | 334-356, 1.174; 181-201, | PKC_PHOSPHO_SITE 38-40; MYRISTYL | |
| | | | 1.13; 614-621, 1.058; | 373-378; PKC_PHOSPHO_SITE 308-310; | |
| | | | 472-494, 1.163; 210-232, | CK2_PHOSPHO_SITE 209-212; MYRISTYL | |
| | | | 1.095; 317-324, 1.082; | 526-531; CK2_PHOSPHO_SITE 26-29; | |
| | | | 531-574, 1.159; 358-372, | CK2_PHOSPHO_SITE 193-196; | |
| | | | 1.101; 245-252, 1.088; | PKC_PHOSPHO_SITE 33-35; MYRISTYL 47-52; | |
| | | | 501-514, 1.115; 302-307, 1.1; | CAMP_PHOSPHO_SITE 313-316; | |
| | | | 76-91, 1.157; 452-465, 1.131; | ASN_GLYCOSYLATION 288-291; | |
| | | | 377-393, 1.137; 408-443, | PKC_PHOSPHO_SITE 51-53; | |
| | | | 1.186; 56-65, 1.094; | PKC_PHOSPHO_SITE 311-313; | |
| | | | 146-174, 1.196; 577-584, | ASN_GLYCOSYLATION 46-49; MYRISTYL | |
| | | | 1.117; | 63-68; PKC_PHOSPHO_SITE 245-247; | |
| | | | | PKC_PHOSPHO_SITE 316-318; | |
| DEX0450_044.aa.1 | Y | 0 - o1-159; | 120-125, 1.058; 137-151, | ASN_GLYCOSYLATION 94-97; | |
| | | | 1.11; 83-89, 1.037; 4-46, | PKC_PHOSPHO_SITE 96-98; | |
| | | | 1.193; 98-107, 1.055; | CAMP_PHOSPHO_SITE 126-129; | |
| | | | | CK2_PHOSPHO_SITE 55-58; | |
| | | | | PKC_PHOSPHO_SITE 17-19; | |
| | | | | PKC_PHOSPHO_SITE 110-112; | |
| | | | | CAMP_PHOSPHO_SITE 19-22; | |
| DEX0450_044.aa.2 | N | 3 —i1-71; | 237-243, 1.037; 168-200, | CAMP_PHOSPHO_SITE 280-283; | |
| | | tm72-94; | 1.193; 252-261, 1.055; | PKC_PHOSPHO_SITE 65-67; | |
| | | o95-108; | 41-51, 1.164; 291-305, 1.11; | CK2_PHOSPHO_SITE 36-39; MYRISTYL 2-7; | |
| | | tm109-131; | 160-165, 1.057; 102-115, | PKC_PHOSPHO_SITE 95-97; MYRISTYL | |
| | | i132-168; | 1.197; 274-279, 1.058; | 33-38; PKC_PHOSPHO_SITE 264-266; | |
| | | tm169-188; | 72-96, 1.297; 17-25, 1.075; | ASN_GLYCOSYLATION 248-251; | |
| | | o189-313; | 117-137, 1.293; 7-14, 1.091; | PKC_PHOSPHO_SITE 144-146; | |
| | | | 57-63, 1.057; | CK2_PHOSPHO_SITE 209-212; | |
| | | | | PKC_PHOSPHO_SITE 250-252; MYRISTYL | |
| | | | | 53-58; CAMP_PHOSPHO_SITE 23-26; | |
| | | | | PKC_PHOSPHO_SITE 21-23; | |
| DEX0450_044.aa.3 | Y | 3 —i1-6; | 224-270, 1.239; 101-133, | CK2_PHOSPHO_SITE 142-145; | |
| | | tm7-29; | 1.193; 170-176, 1.037; | PKC_PHOSPHO_SITE 197-199; | |
| | | o30-43; | 185-194, 1.055; 293-298, | PKC_PHOSPHO_SITE 77-79; | |
| | | tm44-63; | 1.072; 93-98, 1.057; 50-70, | CAMP_PHOSPHO_SITE 213-216; | |
| | | i64-101; | 1.293; 35-48, 1.197; 207-212, | PKC_PHOSPHO_SITE 260-262; | |
| | | tm102-121; | 1.058; 277-290, 1.265; | ASN_GLYCOSYLATION 181-184; | |
| | | o122-301; | 5-29, 1.297; | PKC_PHOSPHO_SITE 28-30; | |
| | | | | CK2_PHOSPHO_SITE 278-281; | |
| | | | | PKC_PHOSPHO_SITE 183-185; | |
| DEX0450_045.aa.1 | N | 0 - o1-98; | | PCK_PHOSPHO_SITE 20-22; | NONHISHMG17 57-71; |
| | | | | CK2_PHOSPHO_SITE 25-28; | NONHISHMG17 85-95; |
| | | | | CAMP_PHOSPHO_SITE 49-52; MYRISTYL 2-7; | NONHISHMG17 72-84; |
| | | | | MYRISTYL 16-21; CAMP_PHOSPHO_SITE | |
| | | | | 73-76; PKC_PHOSPHO_SITE 76-78; | |
| | | | | AMIDATION 38-41; PKC_PHOSPHO_SITE | |
| | | | | 68-70; | |
| DEX0450_045.orf.1 | N | 0 - o1-130; | | PKC_PHOSPHO_SITE 73-75; | HISTAMINEH3R 5-20; |
| | | | | PKC_PHOSPHO_SITE 80-82; MYRISTYL | PRICHEXTENSN 3-15; |
| | | | | 124-129; PKC_PHOSPHO_SITE 11-13; | PRO_RICH 3-84; |
| | | | | MYRISTYL 51-56; CK2_PHOSPHO_SITE | PRICHEXTENSN 26-47; |
| | | | | 101-104; PKC_PHOSPHO_SITE 40-42; | HISTAMINEH3R 81-107; |
| | | | | PKC_PHOSPHO_SITE 125-127; | PRICHEXTENSN 49-65; |
| | | | | PKC_PHOSPHO_SITE 59-61; | PRICHEXTENSN 66-83; |
| | | | | PKC_PHOSPHO_SITE 86-88; | |
| | | | | CK2_PHOSPHO_SITE 125-128; | |
| DEX0450_046.aa.1 | N | 0 - o1-260; | 247-253, 1.054; 23-48, 1.204; | PKC_PHOSPHO_SITE 132-134; MYRISTYL | RRM 107-184; rrm 109-179; |
| | | | 75-83, 1.044; 239-244, 1.043; | 105-110; ASN_GLYCOSYLATION 13-16; | RRM 108-180; |
| | | | 219-226, 1.11; 149-155, | MRISTYL 117-122; PKC_PHOSPHO_SITE | |
| | | | 1.064; 60-66, 1.121; | 15-17; MYRISTYL 18-23; | |
| | | | 133-141, 1.104; 89-94, 1.029; | CK2_PHOSPHO_SITE 112-115; MYRISTYL | |
| | | | 179-186, 1.105; 168-173, | 101-106; CK2_PHOSPHO_SITE 184-187; | |
| | | | 1.075; 105-121, 1.209; | MRISTYL 232-237; MYRISTYL 97-102; | |
| | | | 123-130, 1.041; | CK2_PHOSPHO_SITE 119-122; | |
| | | | | CK2_PHOSPHO_SITE 242-245; MYRISTYL | |
| | | | | 21-26; MYRISTYL 200-205; | |
| | | | | PKC_PHOSPHO_SITE 143-145; | |
| DEX0450_046.orf.1 | N | 0 - o1-243; | | AMIDATION 44-47; CK2_PHOSPHO_SITE | rrm 94-164; RRM 92-169; |
| | | | | 54-57; MYRISTYL 34-39; MYRISTYL 185-190; | RRM 93-165; |
| | | | | PKC_PHOSPHO_SITE 201-203; | |
| | | | | AMIDATION 52-55; MYRISTYL 43-48; | |
| | | | | PKC_PHOSPHO_SITE 93-95; | |
| | | | | CK2_PHOSPHO_SITE 225-228; MYRISTYL | |
| | | | | 215-220; MYRISTYL 102-107; | |
| | | | | CK2_PHOSPHO_SITE 169-172; RGD 87-89; | |
| | | | | PKC_PHOSPHO_SITE 76-78; | |
| | | | | CK2_PHOSPHO_SITE 104-107; MYRISTYL | |
| | | | | 193-198; PKC_PHOSPHO_SITE 68-70; | |
| | | | | CK2_PHOSPHO_SITE 1-4; MYRISTYL 200-205; | |
| | | | | MYRISTYL 30-35; MYRISTYL 196-201; | |
| | | | | PKC_PHOSPHO_SITE 117-119; | |
| | | | | MYRISTYL 39-44; CK2_PHOSPHO_SITE 44-47; | |
| | | | | MYRISTYL 38-43; PKC_PHOSPHO_SITE | |
| | | | | 44-46; PKC_PHOSPHO_SITE 128-130; | |
| DEX0450_047.aa.1 | N | 0 - o1-428; | 300-316, 1.166; 158-176, | PKC_PHOSPHO_SITE 282-284; | ENDOLAPTASE 231-247; |
| | | | 1.167; 178-201, 1.106; | PKC_PHOSPHO_SITE 355-357; MYRISTYL | ENDOLAPTASE 348-367; |
| | | | 246-252, 1.107; 351-363, | 236-241; PKC_PHOSPHO_SITE 23-25; | ENDOLAPTASE 371-389; |
| | | | 1.107; 324-337, 1.16; | CK2_PHOSPHO_SITE 318-321; | FMOXYGENASE 90-106; |
| | | | 389-397, 1.093; 371-383, | PKC_PHOSPHO_SITE 56-58; | ENDOLAPTASE 318-337; |
| | | | 1.222; 23-29, 1.068; | CK2_PHOSPHO_SITE 109-112; | LON_SER 321-329; |
| | | | 120-155, 1.174; 203-209, | PKC_PHOSPHO_SITE 318-320; MYRISTYL | FMOXYGENASE 343-360; |
| | | | 1.065; 268-277, 1.076; | 98-103; PKC_PHOSPHO_SITE 10-12; | |
| | | | 284-297, 1.059; 399-415, | PKC_PHOSPHO_SITE 120-122; | |
| | | | 1.154; 227-237, 1.151; | CK2_PHOSPHO_SITE 30-33; MYRISTYL | |
| | | | 81-99, 1.188; 212-223, 1.117; | 232-237; CK2_PHOSPHO_SITE 113-116; | |
| | | | | CK2_PHOSPHO_SITE 2-5; | |
| | | | | PKC_PHOSPHO_SITE 252-254; | |
| DEX0450_047.orf.1 | N | 0 - o1-287; | | PKC_PHOSPHO_SITE 5-7; | TONB_DEPENDENT_REC_1 1-68; |
| | | | | PKC_PHOSPHO_SITE 177-179; | ENDOLAPTASE 177-196; |
| | | | | ASN_GLYCOSYLATION 4-7; | ENDOLAPTASE 90-106; |
| | | | | PKC_PHOSPHO_SITE 141-143; MYRISTYL | ENDOLAPTASE 230-248; |
| | | | | 95-100; MYRISTYL 5-10; | LON_SER 180-188; |
| | | | | PKC_PHOSPHO_SITE 111-113; | ENDOLAPTASE 207-226; |
| | | | | CK2_PHOSPHO_SITE 177-180; | |
| | | | | LEUCINE_ZIPPER 5-26; | |
| | | | | PKC_PHOSPHO_SITE 214-216; MYRISTYL | |
| | | | | 91-96; | |
| DEX0450_048.aa.1 | N | 0 - o1-247; | 36-42, 1.056; 92-106, 1.093; | ASN_GLYCOSYLATION 133-136; | TCOMPLEXTCP1 136-148; |
| | | | 16-34, 1.191; 220-226, 1.066; | CK2_PHOSPHO_SITE 119-122; | TCOMPLEXTCP1 102-124; |
| | | | 120-130, 1.078; 133-140, | CK2_PHOSPHO_SITE 59-62; MYRISTYL | cpn60_TCP1 1-245; |
| | | | 1.074; 161-183, 1.131; | 203-208; MYRISTYL 207-212; | |
| | | | 228-244, 1.126; 64-81, 1.201; | PKC_PHOSPHO_SITE 116-118; | |
| | | | 4-9, 1.114; 148-153, 1.049; | | |
| DEX0450_048.orf.1 | N | 0 - o1-154; | | ASN_GLYCOSYLATION 40-43; MYRISTYL | TCOMPLEXTCP1 43-55; |
| | | | | 47-52; CK2_PHOSPHO_SITE 26-29; | TCOMPLEXTCP1 9-31; |
| | | | | MYRISTYL 110-115; PKC_PHOSPHO_SITE | |
| | | | | 23-25; MYRISTYL 51-56; MYRISTYL 114-119; | |
| DEX0450_049.aa.1 | N | 0 - o1-269; | | CK2_PHOSPHO_SITE 18-21; | sp_O60568_PLO3_HUMAN |
| | | | | ASN_GLYCOSYLATION 27-30; | 143-266; |
| | | | | TYR_PHOSPHO_SITE 58-65; | |
| | | | | CK2_PHOSPHO_SITE 236-239; MYRISTYL | |
| | | | | 57-62; CK2_PHOSPHO_SITE 60-63; | |
| | | | | PKC_PHOSPHO_SITE 25-27; | |
| | | | | CK2_PHOSPHO_SITE 76-79; | |
| | | | | PKC_PHOSPHO_SITE 98-100; | |
| | | | | CK2_PHOSPHO_SITE 94-97; AMIDATION | |
| | | | | 48-51; ASN_GLYCOSYLATION 58-61; | |
| | | | | MYRISTYL 215-220; CK2_PHOSPHO_SITE | |
| | | | | 68-71; CK2_PHOSPHO_SITE 99-102; | |
| | | | | AMIDATION 75-78; PKC_PHOSPHO_SITE | |
| | | | | 48-50; CK2_PHOSPHO_SITE 239-242; | |
| | | | | MYRISTYL 95-100; MYRISTYL 94-99; | |
| | | | | CK2_PHOSPHO_SITE 110-113; | |
| | | | | PKC_PHOSPHO_SITE 145-147; | |
| | | | | TYR_PHOSPHO_SITE 7-15; AMIDATION | |
| | | | | 124-127; PKC_PHOSPHO_SITE 53-55; | |
| | | | | MYRISTYL 229-234; ASN_GLYCOSYLATION | |
| | | | | 175-178; CK2_PHOSPHO_SITE 112-115; | |
| | | | | CK2_PHOSPHO_SITE 32-35; | |
| | | | | PKC_PHOSPHO_SITE 29-31; | |
| | | | | PKC_PHOSPHO_SITE 76-78; MYRISTYL 45-50; | |
| | | | | PKC_PHOSPHO_SITE 112-114; | |
| | | | | CAMP_PHOSPHO_SITE 50-53; | |
| | | | | CK2_PHOSPHO_SITE 146-149; | |
| | | | | TYR_PHOSPHO_SITE 127-135; | |
| | | | | CK2_PHOSPHO_SITE 29-32; | |
| | | | | ASN_GLYCOSYLATION 51-54; | |
| | | | | CK2_PHOSPHO_SITE 114-117; | |
| DEX0450_049.orf.1 | N | 0 - o1-138; | | PKC_PHOSPHO_SITE 3-5; | sp_O60568_PLO3_HUMAN |
| | | | | TYR_PHOSPHO_SITE 5-13; | 21-138; |
| | | | | PKC_PHOSPHO_SITE 23-25; | |
| | | | | CK2_PHOSPHO_SITE 24-27; | |
| | | | | ASN_GLYCOSYLATION 53-56; MYRISTYL | |
| | | | | 73-78; MYRISTYL 95-100; | |
| DEX0450_050.aa.1 | Y | 4 —i1-25; | 12-50, 1.341; 189-197, 1.212; | ASN_GLYCOSYLATION 187-190; | Mtp 32-226; |
| | | tm26-48; | 213-228, 1.15; 114-140, | CK2_PHOSPHO_SITE 196-199; | |
| | | o49-71; | 1.199; 146-182, 1.264; | ASN_GLYCOSYLATION 54-57; | |
| | | tm72-94; | 72-89, 1.185; 99-112, 1.16; | TYR_PHOSPHO_SITE 186-194; | |
| | | i95-100; | 200-207, 1.154; | PKC_PHOSPHO_SITE 230-232; | |
| | | tm101-123; | | CK2_PHOSPHO_SITE 56-59; | |
| | | o124-154; | | PKC_PHOSPHO_SITE 167-169; | |
| | | tm155-177; | | ASN_GLYCOSYLATION 198-201; | |
| | | i178-233; | | CK2_PHOSPHO_SITE 128-131; MYRISTYL | |
| | | | | 214-219; | |
| DEX0450_050.orf.1 | N | 4 —i1-109; | | PKC_PHOSPHO_SITE 14-16; | Mtp 116-305; |
| | | tm110-132; | | PKC_PHOSPHO_SITE 58-60; MYRISTYL 43-48; | |
| | | o133-155; | | MYRISTYL 54-59; MYRISTYL 47-52; | |
| | | tm156-178; | | PKC_PHOSPHO_SITE 30-32; | |
| | | i179-184; | | CK2_PHOSPHO_SITE 140-143; | |
| | | tm185-207; | | TYR_PHOSPHO_SITE 270-278; MYRISTYL | |
| | | o208-238; | | 48-53; ASN_GLYCOSYLATION 138-141; | |
| | | tm239-261; | | MYRISTYL 298-303; CK2_PHOSPHO_SITE | |
| | | i262-319; | | 280-283; CK2_PHOSPHO_SITE 12-15; | |
| | | | | ASN_GLYCOSYLATION 282-285; MYRISTYL | |
| | | | | 49-54; ASN_GLYCOSYLATION 271-274; | |
| | | | | MYRISTYL 61-66; CAMP_PHOSPHO_SITE | |
| | | | | 66-69; PKC_PHOSPHO_SITE 251-253; | |
| | | | | MYRISTYL 57-62; CK2_PHOSPHO_SITE | |
| | | | | 212-215; MYRISTYL 51-56; | |
| DEX0450_051.aa.1 | N | 0 - o1-76; | 18-18, 1.155; 66-73, 1.117; | MYRISTYL 25-30; MYRISTYL 9-14; | |
| | | | 23-61, 1.206; | MYRISTYL 5-10; MYRISTYL 16-21; | |
| DEX0450_051.orf.1 | Y | 0 - o1-72; | 53-69, 1.054; 4-14, 1.166; | MYRISTYL 35-40; ASN_GLYCOSYLATION | ANTIFREEZEI 52-61; |
| | | | 42-49, 1.071; 27-37, 1.155; | 52-55; MYRISTYL 24-29; | ANTIFREEZEI 18-32; |
| | | | | CK2_PHOSPHO_SITE 18-21; | |
| | | | | PKC_PHOSPHO_SITE 15-17; MYRISTYL 28-33; | |
| | | | | MYRISTYL 44-49; | |
| DEX0450_051.aa.2 | N | 0 - o1-61; | 11-46, 1.206; 51-58, 1.117; | CK2_PHOSPHO_SITE 13-16; | |
| DEX0450_051.orf.2 | N | 0 - o1-57; | 6-15, 1.118; 19-42, 1.206; | | |
| | | | 47-54, 1.117; | | |
| DEX0450_052.aa.1 | N | 0 - o1-267; | | CK2_PHOSPHO_SITE 5-8; | NAP 10-208; |
| | | | | PKC_PHOSPHO_SITE 5-7; | |
| | | | | PKC_PHOSPHO_SITE 149-151; | |
| | | | | CK2_PHOSPHO_SITE 144-147; | |
| | | | | PKC_PHOSPHO_SITE 160-162; | |
| | | | | ASN_GLYCOSYLATION 128-131; MYRISTYL | |
| | | | | 251-256; CK2_PHOSPHO_SITE 95-98; | |
| | | | | PKC_PHOSPHO_SITE 134-136; MYRISTYL | |
| | | | | 64-69; CK2_PHOSPHO_SITE 90-93; | |
| | | | | PKC_PHOSPHO_SITE 144-146; | |
| | | | | CAMP_PHOSPHO_SITE 150-153; | |
| DEX0450_052.orf.1 | N | 0 - o1-148; | | ASN_GLYCOSYLATION 22-25; | NAP 1-102; |
| | | | | PKC_PHOSPHO_SITE 1-3; | |
| | | | | PKC_PHOSPHO_SITE 28-30; | |
| | | | | CK2_PHOSPHO_SITE 141-144; | |
| | | | | CK2_PHOSPHO_SITE 38-41; | |
| | | | | CAMP_PHOSPHO_SITE 44-47; | |
| | | | | PKC_PHOSPHO_SITE 43-45; | |
| | | | | PKC_PHOSPHO_SITE 54-56; | |
| | | | | PKC_PHOSPHO_SITE 38-40; | |
| DEX0450_053.aa.1 | Y | 4 —i1-25; | 226-231, 1.116; 12-50, 1.341; | PKC_PHOSPHO_SITE 175-177; | Mtp 32-234; |
| | | tm26-48; | 208-215, 1.154; 154-190, | TYR_PHOSPHO_SITE 194-202; | |
| | | o49-79; | 1.264; 107-120, 1.16; | CK2_PHOSPHO_SITE 56-59; | |
| | | tm80-102; | 78-97, 1.185; 197-205, 1.212; | ASN_GLYCOSYLATION 195-198; | |
| | | i103-108; | 71-76, 1.085; 122-148, 1.199; | ASN_GLYCOSYLATION 75-78; | |
| | | tm109-131; | | ASN_GLYCOSYLATION 206-209; | |
| | | o132-162; | | ASN_GLYCOSYLATION 54-57; | |
| | | tm163-185; | | CK2_PHOSPHO_SITE 136-139; | |
| | | i186-234; | | CK2_PHOSPHO_SITE 204-207; | |

### Example 1b

### Sequence Alignment Support

[0447] Alignments between previously identified sequences and splice variant sequences are performed to confirm unique portions of splice variant nucleic acid and amino acid sequences. The alignments are done using the Needle program in the European Molecular Biology Open Software Suite (EMBOSS) version 2.2.0 available at www.emboss.org from EMBnet (http://www.embnet.org). Default settings are used unless otherwise noted. The Needle program in EMBOSS implements the Needleman-Wunsch algorithm. Needleman, S. B., Wunsch, C. D., J. Mol. Biol. 48:443-453 (1970).

[0448] It is well know to those skilled in the art that implication of alignment algorithms by various programs may result in minor changes in the generated output. These changes include but are not limited to: alignment scores (percent identity, similarity, and gap), display of nonaligned flanking sequence regions, and number assignment to residues. These minor changes in the output of an alignment do not alter the physical characteristics of the sequences or the differences between the sequences, e.g. regions of homology, insertions, or deletions.

### Example 1c

### RT-PCR Analysis

[0449] To detect the presence and tissue distribution of a particular splice variant Reverse Transcription-Polymerase Chain Reaction (RT-PCR) is performed using cDNA generated from a panel of tissue RNAs. See, e.g., Sambrook et al., Molecular Cloning: A Laboratory Manual, 2d ed., Cold Spring Harbor Laboratory Press (1989) and; Kawasaki ES et al., PNAS 85(15):5698 (1988). Total RNA is extracted from a variety of tissues and first strand cDNA is prepared with reverse transcriptase (RT). Each panel includes 23 cDNAs from five cancer types (lung, ovary, breast, colon, and prostate) and normal samples of testis, placenta and fetal brain. Each cancer set is composed of three cancer cDNAs from different donors and one normal pooled sample. Using a standard enzyme kit from BD Bioscience Clontech (Mountain View, Calif.), the target transcript is detected with sequence-specific primers designed to only amplify the particular splice variant. The PCR reaction is run on the GeneAmp PCR system 9700 (Applied Biosystem, Foster City, Calif.) thermocycler under optimal conditions. One of ordinary skill can design appropriate primers and determine optimal conditions. The amplified product is resolved on an agarose gel to detect a band of equivalent size to the predicted RT-PCR product. A band indicated the presence of the splice variant in a sample. The relation of the amplified product to the splice variant was subsequently confirmed by DNA sequencing.

[0450] After subcloning, all positively screened clones are sequence verified. The DNA sequence verification results show the splice variant contains the predicted sequence differences in comparison with the reference sequence.

[0451] Results for RT-PCR analysis in the table below include the sequence DEX ID, Lead Name, Cancer Tissue(s) the transcript was detected in, Normal Tissue(s) the transcript was detected in, the predicted length of the RT-PCR product, and the Confirmed Length of the RT-PCR product.

| | | | | Pre- | Con- |
|---|---|---|---|---|---|
| | Lead | Cancer | Normal | dicted | firmed |
| DEX ID | Name | Tissue(s) | Tissue(s) | Length | Length |
| DEX0450_007.nt.1 | Cln260 | Prostate | Ovary | 365 bp | 365 bp |

[0452] RT-PCR results confirm the presence SEQ ID NO: 1-94 in biologic samples and distinguish between related transcripts.

### Example 1d

### Secretion Assay

[0453] To determine if a protein encoded by a splice variant is secreted from cells a secretion assay is preformed. A pcDNA3.1 clone containing the gene transcript which encodes the variant protein is transfected into 293T cells using the Superfect transfection reagent (Qiagen, Valencia Calif.). Transfected cells are incubated for 28 hours before the media is collected and immediately spun down to remove any detached cells. The adherent cells are solubilized with lysis buffer (1% NP40, 10 mM sodium phosphate pH7.0, and 0.15M NaCl). The lysed cells are collected and spun down and the supernatant extracted as cell lysate. Western immunoblot is carried out in the following manner: 15 μl of the cell lysate and media are run on 4-12% NuPage Bis-Tris gel (Invitrogen, Carlsbad Calif.), and blotted onto a PVDF membrane (Invitrogen, Carlsbad Calif.). The blot is incubated with a polyclonal primary antibody which binds to the variant protein (Imgenex, San Diego Calif.) and polyclonal goat anti-rabbit-peroxidase secondary antibody (Sigma-Aldrich, St. Louis Mo.). The blot is developed with the ECL Plus chemiluminescent detection reagent (Amersham BioSciences, Piscataway N.J.).

[0454] Secretion assay results are indicative of SEQ ID NO: 95-248 being a diagnostic marker and/or therapeutic target for cancer.

### Example 2a

### Gene Expression Analysis

[0455] Custom Microarray Experiment—Cancer

[0456] Custom oligonucleotide microarrays were provided by Agilent Technologies, Inc. (Palo Alto, Calif.). The microarrays were fabricated by Agilent using their technology for the in-situ synthesis of 60 mer oligonucleotides (Hughes, et al. 2001, Nature Biotechnology 19:342-347). The 60 mer microarray probes were designed by Agilent, from gene sequences provided by diaDexus, using Agilent proprietary algorithms. Whenever possible two different 60 mers were designed for each gene of interest.

[0457] All microarray experiments were two-color experiments and were preformed using Agilent-recommended protocols and reagents. Briefly, each microarray was hybridized with cRNAs synthesized from RNA (total RNA for ovarian and prostate, polyA+RNA for lung, breast and colon samples), isolated from cancer and normal tissues, labeled with fluorescent dyes Cyanine3 (Cy3) or Cyanine5 (CyS) (NEN Life Science Products, Inc., Boston, Mass.) using a linear amplification method (Agilent). In each experiment the experimental sample was RNA isolated from cancer tissue from a single individual and the reference sample was a pool of RNA isolated from normal tissues of the same organ as the cancerous tissue (i.e. normal ovarian tissue in experiments with ovarian cancer samples). Hybridizations were carried out at 60° C., overnight using Agilent in-situ hybridization buffer. Following washing, arrays were scanned with a GenePix 4000B Microarray Scanner (Axon Instruments, Inc., Union City, Calif.). The resulting images were analyzed with GenePix Pro 3.0 Microarray Acquisition and Analysis Software (Axon).

[0458] Data normalization and expression profiling were done with Expressionist software from GeneData Inc. (Daly City, Calif./Basel, Switzerland). Gene expression analysis was performed using only experiments that met certain quality criteria. The quality criteria that experiments must meet are a combination of evaluations performed by the Expressionist software and evaluations performed manually using raw and normalized data. To evaluate raw data quality, detection limits (the mean signal for a replicated negative control +2 Standard Deviations (SD)) for each channel were calculated. The detection limit is a measure of non-specific hybridization. Acceptable detection limits were defined for each dye (<80 for CyS and <150 for Cy3). Arrays with poor detection limits in one or both channels were not analyzed and the experiments were repeated. To evaluate normalized data quality, positive control elements included in the array were utilized. These array features should have a mean ratio of 1 (no differential expression). If these features have a mean ratio of greater than 1.5-fold up or down, the experiments were not analyzed further and were repeated. In addition to traditional scatter plots demonstrating the distribution of signal in each experiment, the Expressionist software also has minimum thresholding criteria that employ user defined parameters to identify quality data. These thresholds include two distinct quality measurements: 1) minimum area percentage, which is a measure of the integrity of each spot and 2) signal to noise ratio, which ensures that the signal being measured is significantly above any background (nonspecific) signal present. Only those features that met the threshold criteria were included in the filtering and analyses carried out by Expressionist. The thresholding settings employed require a minimum area percentage of 60% [(% pixels>background+2SD)−(% pixels saturated)], and a minimum signal to noise ratio of 2.0 in both channels. By these criteria, very low expressors, saturated features and spots with abnormally high local background were not included in analysis.

[0459] Relative expression data was collected from Expressionist based on filtering and clustering analyses. Up-regulated genes were identified using criteria for the percentage of experiments in which the gene is up-regulated by at least 2-fold. In general, up-regulation in ˜30% of samples tested was used as a cutoff for filtering.

[0460] Two microarray experiments were preformed for each normal and cancer tissue pair. The tissue specific Array Chip for each cancer tissue is a unique microarray specific to that tissue and cancer. The Multi-Cancer Array Chip is a universal microarray that was hybridized with samples from each of the cancers (ovarian, breast, colon, lung, and prostate). See the description below for the experiments specific to the different cancers.

Microarray Experiments and Data Tables

[0461] Colon Cancer Chips

[0462] For colon cancer two different chip designs were evaluated with overlapping sets of a total of 38 samples, comparing the expression patterns of colon cancer derived polyA+RNA to polyA+RNA isolated from a pool of 7 normal colon tissues. For the Colon Array Chip all 38 samples (23 Ascending colon carcinomas and 15 Rectosigmoidal carcinomas including: 5 stage I cancers, 15 stage II cancers, 15 stage III and 2 stage IV cancers, as well as 28 Grade ½ and 10 Grade 3 cancers) were analyzed. The histopathologic grades for cancer are classified as follows: GX, cannot be assessed; G1, well differentiated; G2, Moderately differentiated; G3, poorly differentiated; and G4, undifferentiated. AJCC Cancer Staging Handbook, 5^{th} Edition, 1998, page 9. For the

[0463] Colon Array Chip analysis, samples were further divided into groups based on the expression pattern of the known colon cancer associated gene Thymidilate Synthase (TS) (13 TS up 25 TS not up). The association of TS with advanced colorectal cancer is well documented. Paradiso et al., Br J Cancer 82(3):560-7 (2000); Etienne et al., J Clin Oncol. 20(12):2832-43 (2002); Aschele et al. Clin Cancer Res. 6(12):4797-802 (2000). For the Multi-Cancer Array Chip a subset of 27 of these samples (14 Ascending colon carcinomas and 13 Rectosigmoidal carcinomas including: 3 stage I cancers, 9 stage II cancers, 13 stage III and 2 stage IV cancers) were assessed.

[0464] The results for the statistically significant up-regulated genes on the Colon Array Chip are shown in Tables 1 and 2. The results for the statistically significant up-regulated genes on the Multi-Cancer Array Chip are shown in Table 3.

[0465] The first two columns of each table contain information about the sequence itself (Seq ID, Oligo Name), the next columns show the results obtained for all (“ALL”) the colon samples, ascending colon carcinomas (“ASC”), Rectosigmoidal carcinomas (“RS”), cancers corresponding to stages I and II (“ST1,2”), stages m and IV (“ST3,4”), grades 1 and 2 (“GR1,2”), grade 3 (“GR3”), cancers exhibiting up-regulation of the TS gene (“TSup”) or those not exhibiting up-regulation of the TS gene (“NOT TSup”). ‘% up’ indicates the percentage of all experiments in which up-regulation of at least 2-fold was observed n=38 for the Colon Array Chip (n=27 for the Multi-Cancer Array Chip), ‘% valid up’ indicates the percentage of experiments with valid expression values in which up-regulation of at least 2-fold was observed.

TABLE 1

| | | | | | | | | | Cln | | |
|---|---|---|---|---|---|---|---|---|---|---|---|
| | | | Cln | | | | Cln | | ST1, | | Cln |
| | | Cln | ALL | Cln | | Cln | Rs % | Cln | 2 % | Cln | ST3, 4 |
| | | ALL | % valid | ASC | Cln ASC | RS | valid | ST1, 2 | valid | ST3, 4 | % valid |
| | Oligo | % up | up | % up | % valid | % up | up | % up | up | % up | up |
| DEX ID | Name | n = 38 | n = 38 | n = 23 | up n = 23 | n = 15 | n = 15 | n = 20 | n = 20 | n = 18 | n = 18 |
| DEX0450_002.nt.1 | 31003.0 | 5.3 | 5.9 | 4.3 | 4.8 | 6.7 | 7.7 | 0.0 | 0.0 | 11.1 | 11.8 |
| DEX0450_002.nt.1 | 31158.0 | 0.0 | 0.0 | 0.0 | 0.0 | 0.0 | 0.0 | 0.0 | 0.0 | 0.0 | 0.0 |
| DEX0450_002.nt.1 | 31159.0 | 10.5 | 10.5 | 13.0 | 13.0 | 6.7 | 6.7 | 5.0 | 5.0 | 16.7 | 16.7 |
| DEX0450_002.nt.1 | 31162.0 | 15.8 | 16.2 | 26.1 | 26.1 | 0.0 | 0.0 | 15.0 | 15.8 | 16.7 | 16.7 |
| DEX0450_002.nt.1 | 31163.0 | 7.9 | 7.9 | 13.0 | 13.0 | 0.0 | 0.0 | 5.0 | 5.0 | 11.1 | 11.1 |
| DEX0450_002.nt.1 | 34074.0 | 13.2 | 14.7 | 17.4 | 19.0 | 6.7 | 7.7 | 5.0 | 5.9 | 22.2 | 23.5 |
| DEX0450_002.nt.1 | 34075.0 | 2.6 | 2.7 | 0.0 | 0.0 | 6.7 | 6.7 | 0.0 | 0.0 | 5.6 | 5.9 |
| DEX0450_003.nt.1 | 31446.0 | 2.6 | 3.1 | 0.0 | 0.0 | 6.7 | 7.1 | 0.0 | 0.0 | 5.6 | 6.7 |
| DEX0450_003.nt.2 | 31447.0 | 0.0 | 0.0 | 0.0 | 0.0 | 0.0 | 0.0 | 0.0 | 0.0 | 0.0 | 0.0 |
| DEX0450_003.nt.3 | 31443.0 | 0.0 | 0.0 | 0.0 | 0.0 | 0.0 | 0.0 | 0.0 | 0.0 | 0.0 | 0.0 |
| DEX0450_003.nt.3 | 31447.0 | 0.0 | 0.0 | 0.0 | 0.0 | 0.0 | 0.0 | 0.0 | 0.0 | 0.0 | 0.0 |
| DEX0450_004.nt.1 | 10720.0 | 36.8 | 36.8 | 21.7 | 21.7 | 60.0 | 60.0 | 30.0 | 30.0 | 44.4 | 44.4 |
| DEX0450_004.nt.1 | 10721.0 | 36.8 | 36.8 | 21.7 | 21.7 | 60.0 | 60.0 | 30.0 | 30.0 | 44.4 | 44.4 |
| DEX0450_005.nt.1 | 16776.0 | 2.6 | 3.1 | 4.3 | 5.0 | 0.0 | 0.0 | 0.0 | 0.0 | 5.6 | 7.1 |
| DEX0450_005.nt.1 | 16777.0 | 0.0 | 0.0 | 0.0 | 0.0 | 0.0 | 0.0 | 0.0 | 0.0 | 0.0 | 0.0 |
| DEX0450_005.nt.1 | 38049.0 | 47.4 | 47.4 | 43.5 | 43.5 | 53.3 | 53.3 | 50.0 | 50.0 | 44.4 | 44.4 |
| DEX0450_005.nt.1 | 38050.0 | 55.3 | 55.3 | 47.8 | 47.8 | 66.7 | 66.7 | 60.0 | 60.0 | 50.0 | 50.0 |
| DEX0450_006.nt.1 | 35170.0 | 28.9 | 84.6 | 21.7 | 71.4 | 40.0 | 100.0 | 30.0 | 85.7 | 27.8 | 83.3 |
| DEX0450_006.nt.1 | 35171.0 | 21.1 | 40.0 | 21.7 | 35.7 | 20.0 | 50.0 | 25.0 | 45.5 | 16.7 | 33.3 |
| DEX0450_007.nt.1 | 35170.0 | 28.9 | 84.6 | 21.7 | 71.4 | 40.0 | 100.0 | 30.0 | 85.7 | 27.8 | 83.3 |
| DEX0450_007.nt.1 | 35171.0 | 21.1 | 40.0 | 21.7 | 35.7 | 20.0 | 50.0 | 25.0 | 45.5 | 16.7 | 33.3 |
| DEX0450_008.nt.1 | 30227.0 | 50.0 | 50.0 | 60.9 | 60.9 | 33.3 | 33.3 | 55.0 | 55.0 | 44.4 | 44.4 |
| DEX0450_008.nt.1 | 30228.0 | 44.7 | 44.7 | 56.5 | 56.5 | 26.7 | 26.7 | 45.0 | 45.0 | 44.4 | 44.4 |
| DEX0450_009.nt.1 | 39839.0 | 10.5 | 10.5 | 13.0 | 13.0 | 6.7 | 6.7 | 0.0 | 0.0 | 22.2 | 22.2 |
| DEX0450_009.nt.1 | 39840.0 | 10.5 | 10.8 | 13.0 | 13.6 | 6.7 | 6.7 | 0.0 | 0.0 | 22.2 | 22.2 |
| DEX0450_009.nt.2 | 39839.0 | 10.5 | 10.5 | 13.0 | 13.0 | 6.7 | 6.7 | 0.0 | 0.0 | 22.2 | 22.2 |
| DEX0450_009.nt.2 | 39840.0 | 10.5 | 10.8 | 13.0 | 13.6 | 6.7 | 6.7 | 0.0 | 0.0 | 22.2 | 22.2 |
| DEX0450_010.nt.1 | 29571.0 | 31.6 | 31.6 | 43.5 | 43.5 | 13.3 | 13.3 | 25.0 | 25.0 | 38.9 | 38.9 |
| DEX0450_010.nt.1 | 29582.0 | 52.6 | 52.6 | 60.9 | 60.9 | 40.0 | 40.0 | 45.0 | 45.0 | 61.1 | 61.1 |
| DEX0450_010.nt.1 | 29595.0 | 52.6 | 52.6 | 56.5 | 56.5 | 46.7 | 46.7 | 45.0 | 45.0 | 61.1 | 61.1 |
| DEX0450_010.nt.1 | 29609.0 | 47.4 | 47.4 | 52.2 | 52.2 | 40.0 | 40.0 | 40.0 | 40.0 | 55.6 | 55.6 |
| DEX0450_010.nt.1 | 29611.0 | 52.6 | 52.6 | 56.5 | 56.5 | 46.7 | 46.7 | 45.0 | 45.0 | 61.1 | 61.1 |
| DEX0450_010.nt.1 | 29612.0 | 50.0 | 50.0 | 52.2 | 52.2 | 46.7 | 46.7 | 45.0 | 45.0 | 55.6 | 55.6 |
| DEX0450_010.nt.2 | 29582.0 | 52.6 | 52.6 | 60.9 | 60.9 | 40.0 | 40.0 | 45.0 | 45.0 | 61.1 | 61.1 |
| DEX0450_010.nt.2 | 29595.0 | 52.6 | 52.6 | 56.5 | 56.5 | 46.7 | 46.7 | 45.0 | 45.0 | 61.1 | 61.1 |
| DEX0450_010.nt.2 | 29609.0 | 47.4 | 47.4 | 52.2 | 52.2 | 40.0 | 40.0 | 40.0 | 40.0 | 55.6 | 55.6 |
| DEX0450_010.nt.2 | 29611.0 | 52.6 | 52.6 | 56.5 | 56.5 | 46.7 | 46.7 | 45.0 | 45.0 | 61.1 | 61.1 |
| DEX0450_010.nt.2 | 29612.0 | 50.0 | 50.0 | 52.2 | 52.2 | 46.7 | 46.7 | 45.0 | 45.0 | 55.6 | 55.6 |
| DEX0450_010.nt.3 | 29571.0 | 31.6 | 31.6 | 43.5 | 43.5 | 13.3 | 13.3 | 25.0 | 25.0 | 38.9 | 38.9 |
| DEX0450_010.nt.3 | 29572.0 | 5.3 | 5.3 | 4.3 | 4.3 | 6.7 | 6.7 | 10.0 | 10.0 | 0.0 | 0.0 |
| DEX0450_010.nt.3 | 29582.0 | 52.6 | 52.6 | 60.9 | 60.9 | 40.0 | 40.0 | 45.0 | 45.0 | 61.1 | 61.1 |
| DEX0450_010.nt.3 | 29595.0 | 52.6 | 52.6 | 56.5 | 56.5 | 46.7 | 46.7 | 45.0 | 45.0 | 61.1 | 61.1 |
| DEX0450_010.nt.3 | 29609.0 | 47.4 | 47.4 | 52.2 | 52.2 | 40.0 | 40.0 | 40.0 | 40.0 | 55.6 | 55.6 |
| DEX0450_010.nt.3 | 29611.0 | 52.6 | 52.6 | 56.5 | 56.5 | 46.7 | 46.7 | 45.0 | 45.0 | 61.1 | 61.1 |
| DEX0450_010.nt.3 | 29612.0 | 50.0 | 50.0 | 52.2 | 52.2 | 46.7 | 46.7 | 45.0 | 45.0 | 55.6 | 55.6 |
| DEX0450_010.nt.3 | 36747.0 | 0.0 | 0.0 | 0.0 | 0.0 | 0.0 | 0.0 | 0.0 | 0.0 | 0.0 | 0.0 |
| DEX0450_011.nt.1 | 22654.0 | 10.5 | 10.5 | 17.4 | 17.4 | 0.0 | 0.0 | 10.0 | 10.0 | 11.1 | 11.1 |
| DEX0450_012.nt.1 | 8377.0 | 13.2 | 13.2 | 21.7 | 21.7 | 0.0 | 0.0 | 15.0 | 15.0 | 11.1 | 11.1 |
| DEX0450_013.nt.1 | 32220.0 | 47.4 | 47.4 | 43.5 | 43.5 | 53.3 | 53.3 | 30.0 | 30.0 | 66.7 | 66.7 |
| DEX0450_013.nt.1 | 32221.0 | 60.5 | 63.9 | 52.2 | 54.5 | 73.3 | 78.6 | 50.0 | 52.6 | 72.2 | 76.5 |
| DEX0450_013.nt.1 | 32254.0 | 0.0 | 0.0 | 0.0 | 0.0 | 0.0 | 0.0 | 0.0 | 0.0 | 0.0 | 0.0 |
| DEX0450_013.nt.1 | 32255.0 | 0.0 | 0.0 | 0.0 | 0.0 | 0.0 | 0.0 | 0.0 | 0.0 | 0.0 | 0.0 |
| DEX0450_013.nt.1 | 33033.0 | 0.0 | 0.0 | 0.0 | 0.0 | 0.0 | 0.0 | 0.0 | 0.0 | 0.0 | 0.0 |
| DEX0450_014.nt.1 | 32458.0 | 0.0 | 0.0 | 0.0 | 0.0 | 0.0 | 0.0 | 0.0 | 0.0 | 0.0 | 0.0 |
| DEX0450_014.nt.1 | 32459.0 | 5.3 | 5.4 | 8.7 | 8.7 | 0.0 | 0.0 | 0.0 | 0.0 | 11.1 | 11.1 |
| DEX0450_015.nt.1 | 33503.0 | 18.4 | 18.9 | 30.4 | 31.8 | 0.0 | 0.0 | 15.0 | 15.8 | 22.2 | 22.2 |
| DEX0450_016.nt.1 | 33083.0 | 5.3 | 5.3 | 4.3 | 4.3 | 6.7 | 6.7 | 10.0 | 10.0 | 0.0 | 0.0 |
| DEX0450_016.nt.1 | 35091.0 | 21.1 | 21.1 | 30.4 | 30.4 | 6.7 | 6.7 | 20.0 | 20.0 | 22.2 | 22.2 |
| DEX0450_016.nt.2 | 33083.0 | 5.3 | 5.3 | 4.3 | 4.3 | 6.7 | 6.7 | 10.0 | 10.0 | 0.0 | 0.0 |
| DEX0450_016.nt.2 | 35091.0 | 21.1 | 21.1 | 30.4 | 30.4 | 6.7 | 6.7 | 20.0 | 20.0 | 22.2 | 22.2 |
| DEX0450_016.nt.3 | 33083.0 | 5.3 | 5.3 | 4.3 | 4.3 | 6.7 | 6.7 | 10.0 | 10.0 | 0.0 | 0.0 |
| DEX0450_016.nt.3 | 35091.0 | 21.1 | 21.1 | 30.4 | 30.4 | 6.7 | 6.7 | 20.0 | 20.0 | 22.2 | 22.2 |
| DEX0450_017.nt.1 | 36711.0 | 2.6 | 2.6 | 0.0 | 0.0 | 6.7 | 6.7 | 0.0 | 0.0 | 5.6 | 5.6 |
| DEX0450_017.nt.1 | 36712.0 | 2.6 | 2.8 | 0.0 | 0.0 | 6.7 | 7.1 | 0.0 | 0.0 | 5.6 | 5.9 |
| DEX0450_017.nt.1 | 39631.0 | 2.6 | 2.8 | 0.0 | 0.0 | 6.7 | 7.1 | 0.0 | 0.0 | 5.6 | 5.9 |
| DEX0450_017.nt.1 | 39635.0 | 5.3 | 5.3 | 4.3 | 4.3 | 6.7 | 6.7 | 0.0 | 0.0 | 11.1 | 11.1 |
| DEX0450_017.nt.1 | 39636.0 | 2.6 | 2.6 | 0.0 | 0.0 | 6.7 | 6.7 | 0.0 | 0.0 | 5.6 | 5.6 |
| DEX0450_017.nt.1 | 39769.0 | 13.2 | 13.2 | 17.4 | 17.4 | 6.7 | 6.7 | 5.0 | 5.0 | 22.2 | 22.2 |
| DEX0450_017.nt.1 | 39770.0 | 5.3 | 5.3 | 4.3 | 4.3 | 6.7 | 6.7 | 0.0 | 0.0 | 11.1 | 11.1 |
| DEX0450_017.nt.2 | 36711.0 | 2.6 | 2.6 | 0.0 | 0.0 | 6.7 | 6.7 | 0.0 | 0.0 | 5.6 | 5.6 |
| DEX0450_017.nt.2 | 39631.0 | 2.6 | 2.8 | 0.0 | 0.0 | 6.7 | 7.1 | 0.0 | 0.0 | 5.6 | 5.9 |
| DEX0450_017.nt.2 | 39635.0 | 5.3 | 5.3 | 4.3 | 4.3 | 6.7 | 6.7 | 0.0 | 0.0 | 11.1 | 11.1 |
| DEX0450_017.nt.2 | 39636.0 | 2.6 | 2.6 | 0.0 | 0.0 | 6.7 | 6.7 | 0.0 | 0.0 | 5.6 | 5.6 |
| DEX0450_017.nt.2 | 39769.0 | 13.2 | 13.2 | 17.4 | 17.4 | 6.7 | 6.7 | 5.0 | 5.0 | 22.2 | 22.2 |
| DEX0450_017.nt.2 | 39770.0 | 5.3 | 5.3 | 4.3 | 4.3 | 6.7 | 6.7 | 0.0 | 0.0 | 11.1 | 11.1 |
| DEX0450_017.nt.3 | 39631.0 | 2.6 | 2.8 | 0.0 | 0.0 | 6.7 | 7.1 | 0.0 | 0.0 | 5.6 | 5.9 |
| DEX0450_017.nt.3 | 39635.0 | 5.3 | 5.3 | 4.3 | 4.3 | 6.7 | 6.7 | 0.0 | 0.0 | 11.1 | 11.1 |
| DEX0450_017.nt.3 | 39636.0 | 2.6 | 2.6 | 0.0 | 0.0 | 6.7 | 6.7 | 0.0 | 0.0 | 5.6 | 5.6 |
| DEX0450_017.nt.3 | 39769.0 | 13.2 | 13.2 | 17.4 | 17.4 | 6.7 | 6.7 | 5.0 | 5.0 | 22.2 | 22.2 |
| DEX0450_018.nt.1 | 31424.0 | 10.5 | 11.8 | 13.0 | 13.6 | 6.7 | 8.3 | 10.0 | 11.1 | 11.1 | 12.5 |
| DEX0450_018.nt.1 | 31425.0 | 10.5 | 12.1 | 13.0 | 14.3 | 6.7 | 8.3 | 5.0 | 5.3 | 16.7 | 21.4 |
| DEX0450_018.nt.2 | 31424.0 | 10.5 | 11.8 | 13.0 | 13.6 | 6.7 | 8.3 | 10.0 | 11.1 | 11.1 | 12.5 |
| DEX0450_018.nt.2 | 31425.0 | 10.5 | 12.1 | 13.0 | 14.3 | 6.7 | 8.3 | 5.0 | 5.3 | 16.7 | 21.4 |
| DEX0450_018.nt.3 | 31424.0 | 10.5 | 11.8 | 13.0 | 13.6 | 6.7 | 8.3 | 10.0 | 11.1 | 11.1 | 12.5 |
| DEX0450_018.nt.3 | 31425.0 | 10.5 | 12.1 | 13.0 | 14.3 | 6.7 | 8.3 | 5.0 | 5.3 | 16.7 | 21.4 |
| DEX0450_019.nt.1 | 32748.0 | 0.0 | 0.0 | 0.0 | 0.0 | 0.0 | 0.0 | 0.0 | 0.0 | 0.0 | 0.0 |
| DEX0450_019.nt.1 | 33066.0 | 10.5 | 10.5 | 17.4 | 17.4 | 0.0 | 0.0 | 20.0 | 20.0 | 0.0 | 0.0 |
| DEX0450_019.nt.1 | 33067.0 | 15.8 | 15.8 | 26.1 | 26.1 | 0.0 | 0.0 | 20.0 | 20.0 | 11.1 | 11.1 |
| DEX0450_019.nt.1 | 35570.0 | 15.8 | 16.2 | 26.1 | 26.1 | 0.0 | 0.0 | 20.0 | 21.1 | 11.1 | 11.1 |
| DEX0450_019.nt.1 | 35571.0 | 18.4 | 18.4 | 30.4 | 30.4 | 0.0 | 0.0 | 25.0 | 25.0 | 11.1 | 11.1 |
| DEX0450_019.nt.2 | 32748.0 | 0.0 | 0.0 | 0.0 | 0.0 | 0.0 | 0.0 | 0.0 | 0.0 | 0.0 | 0.0 |
| DEX0450_019.nt.2 | 33066.0 | 10.5 | 10.5 | 17.4 | 17.4 | 0.0 | 0.0 | 20.0 | 20.0 | 0.0 | 0.0 |
| DEX0450_019.nt.2 | 33067.0 | 15.8 | 15.8 | 26.1 | 26.1 | 0.0 | 0.0 | 20.0 | 20.0 | 11.1 | 11.1 |
| DEX0450_019.nt.2 | 35570.0 | 15.8 | 16.2 | 26.1 | 26.1 | 0.0 | 0.0 | 20.0 | 21.1 | 11.1 | 11.1 |
| DEX0450_019.nt.2 | 35571.0 | 18.4 | 18.4 | 30.4 | 30.4 | 0.0 | 0.0 | 25.0 | 25.0 | 11.1 | 11.1 |
| DEX0450_019.nt.3 | 32748.0 | 0.0 | 0.0 | 0.0 | 0.0 | 0.0 | 0.0 | 0.0 | 0.0 | 0.0 | 0.0 |
| DEX0450_019.nt.3 | 33066.0 | 10.5 | 10.5 | 17.4 | 17.4 | 0.0 | 0.0 | 20.0 | 20.0 | 0.0 | 0.0 |
| DEX0450_019.nt.3 | 33067.0 | 15.8 | 15.8 | 26.1 | 26.1 | 0.0 | 0.0 | 20.0 | 20.0 | 11.1 | 11.1 |
| DEX0450_019.nt.3 | 35570.0 | 15.8 | 16.2 | 26.1 | 26.1 | 0.0 | 0.0 | 20.0 | 21.1 | 11.1 | 11.1 |
| DEX0450_019.nt.3 | 35571.0 | 18.4 | 18.4 | 30.4 | 30.4 | 0.0 | 0.0 | 25.0 | 25.0 | 11.1 | 11.1 |
| DEX0450_020.nt.1 | 32972.0 | 7.9 | 7.9 | 8.7 | 8.7 | 6.7 | 6.7 | 0.0 | 0.0 | 16.7 | 16.7 |
| DEX0450_020.nt.1 | 32990.0 | 5.3 | 5.3 | 4.3 | 4.3 | 6.7 | 6.7 | 0.0 | 0.0 | 11.1 | 11.1 |
| DEX0450_020.nt.1 | 32991.0 | 5.3 | 5.3 | 4.3 | 4.3 | 6.7 | 6.7 | 0.0 | 0.0 | 11.1 | 11.1 |
| DEX0450_020.nt.1 | 32992.0 | 7.9 | 7.9 | 4.3 | 4.3 | 13.3 | 13.3 | 0.0 | 0.0 | 16.7 | 16.7 |
| DEX0450_020.nt.1 | 32994.0 | 5.3 | 5.3 | 4.3 | 4.3 | 6.7 | 6.7 | 0.0 | 0.0 | 11.1 | 11.1 |
| DEX0450_020.nt.1 | 32995.0 | 5.3 | 5.3 | 4.3 | 4.3 | 6.7 | 6.7 | 0.0 | 0.0 | 11.1 | 11.1 |
| DEX0450_020.nt.1 | 35546.0 | 7.9 | 7.9 | 4.3 | 4.3 | 13.3 | 13.3 | 0.0 | 0.0 | 16.7 | 16.7 |
| DEX0450_020.nt.2 | 32972.0 | 7.9 | 7.9 | 8.7 | 8.7 | 6.7 | 6.7 | 0.0 | 0.0 | 16.7 | 16.7 |
| DEX0450_020.nt.2 | 32990.0 | 5.3 | 5.3 | 4.3 | 4.3 | 6.7 | 6.7 | 0.0 | 0.0 | 11.1 | 11.1 |
| DEX0450_020.nt.2 | 32991.0 | 5.3 | 5.3 | 4.3 | 4.3 | 6.7 | 6.7 | 0.0 | 0.0 | 11.1 | 11.1 |
| DEX0450_020.nt.2 | 32992.0 | 7.9 | 7.9 | 4.3 | 4.3 | 13.3 | 13.3 | 0.0 | 0.0 | 16.7 | 16.7 |
| DEX0450_020.nt.2 | 32995.0 | 5.3 | 5.3 | 4.3 | 4.3 | 6.7 | 6.7 | 0.0 | 0.0 | 11.1 | 11.1 |
| DEX0450_020.nt.2 | 35546.0 | 7.9 | 7.9 | 4.3 | 4.3 | 13.3 | 13.3 | 0.0 | 0.0 | 16.7 | 16.7 |
| DEX0450_020.nt.3 | 32972.0 | 7.9 | 7.9 | 8.7 | 8.7 | 6.7 | 6.7 | 0.0 | 0.0 | 16.7 | 16.7 |
| DEX0450_020.nt.3 | 32990.0 | 5.3 | 5.3 | 4.3 | 4.3 | 6.7 | 6.7 | 0.0 | 0.0 | 11.1 | 11.1 |
| DEX0450_020.nt.3 | 32991.0 | 5.3 | 5.3 | 4.3 | 4.3 | 6.7 | 6.7 | 0.0 | 0.0 | 11.1 | 11.1 |
| DEX0450_020.nt.3 | 32992.0 | 7.9 | 7.9 | 4.3 | 4.3 | 13.3 | 13.3 | 0.0 | 0.0 | 16.7 | 16.7 |
| DEX0450_020.nt.3 | 32995.0 | 5.3 | 5.3 | 4.3 | 4.3 | 6.7 | 6.7 | 0.0 | 0.0 | 11.1 | 11.1 |
| DEX0450_020.nt.3 | 35546.0 | 7.9 | 7.9 | 4.3 | 4.3 | 13.3 | 13.3 | 0.0 | 0.0 | 16.7 | 16.7 |
| DEX0450_021.nt.1 | 10700.0 | 2.6 | 4.5 | 4.3 | 6.7 | 0.0 | 0.0 | 5.0 | 7.7 | 0.0 | 0.0 |
| DEX0450_021.nt.1 | 10701.0 | 2.6 | 3.4 | 0.0 | 0.0 | 6.7 | 10.0 | 0.0 | 0.0 | 5.6 | 7.1 |
| DEX0450_021.nt.1 | 10744.0 | 15.8 | 17.1 | 17.4 | 19.0 | 13.3 | 14.3 | 15.0 | 16.7 | 16.7 | 17.6 |
| DEX0450_021.nt.1 | 10745.0 | 5.3 | 6.5 | 8.7 | 10.5 | 0.0 | 0.0 | 0.0 | 0.0 | 11.1 | 12.5 |
| DEX0450_022.nt.1 | 12057.0 | 10.5 | 11.1 | 13.0 | 14.3 | 6.7 | 6.7 | 5.0 | 5.3 | 16.7 | 17.6 |
| DEX0450_022.nt.1 | 12058.0 | 2.6 | 2.6 | 0.0 | 0.0 | 6.7 | 6.7 | 0.0 | 0.0 | 5.6 | 5.6 |
| DEX0450_023.nt.1 | 8910.0 | 26.3 | 26.3 | 34.8 | 34.8 | 13.3 | 13.3 | 25.0 | 25.0 | 27.8 | 27.8 |
| DEX0450_024.nt.1 | 36564.0 | 34.2 | 34.2 | 39.1 | 39.1 | 26.7 | 26.7 | 30.0 | 30.0 | 38.9 | 38.9 |
| DEX0450_025.nt.1 | 37705.0 | 26.3 | 26.3 | 21.7 | 21.7 | 33.3 | 33.3 | 30.0 | 30.0 | 22.2 | 22.2 |
| DEX0450_025.nt.1 | 37706.0 | 21.1 | 21.1 | 13.0 | 13.0 | 33.3 | 33.3 | 20.0 | 20.0 | 22.2 | 22.2 |
| DEX0450_027.nt.1 | 35470.0 | 34.2 | 34.2 | 39.1 | 39.1 | 26.7 | 26.7 | 30.0 | 30.0 | 38.9 | 38.9 |
| DEX0450_027.nt.1 | 35471.0 | 42.1 | 42.1 | 43.5 | 43.5 | 40.0 | 40.0 | 35.0 | 35.0 | 50.0 | 50.0 |
| DEX0450_027.nt.2 | 35470.0 | 34.2 | 34.2 | 39.1 | 39.1 | 26.7 | 26.7 | 30.0 | 30.0 | 38.9 | 38.9 |
| DEX0450_027.nt.2 | 35471.0 | 42.1 | 42.1 | 43.5 | 43.5 | 40.0 | 40.0 | 35.0 | 35.0 | 50.0 | 50.0 |
| DEX0450_028.nt.1 | 31539.0 | 0.0 | 0.0 | 0.0 | 0.0 | 0.0 | 0.0 | 0.0 | 0.0 | 0.0 | 0.0 |
| DEX0450_028.nt.1 | 31545.0 | 13.2 | 13.2 | 17.4 | 17.4 | 6.7 | 6.7 | 10.0 | 10.0 | 16.7 | 16.7 |
| DEX0450_030.nt.1 | 8410.0 | 13.2 | 13.2 | 13.0 | 13.0 | 13.3 | 13.3 | 15.0 | 15.0 | 11.1 | 11.1 |
| DEX0450_030.nt.1 | 8411.0 | 13.2 | 13.2 | 13.0 | 13.0 | 13.3 | 13.3 | 15.0 | 15.0 | 11.1 | 11.1 |
| DEX0450_031.nt.1 | 21356.0 | 18.4 | 18.9 | 30.4 | 31.8 | 0.0 | 0.0 | 20.0 | 21.1 | 16.7 | 16.7 |
| DEX0450_031.nt.1 | 28423.0 | 18.4 | 18.9 | 30.4 | 30.4 | 0.0 | 0.0 | 20.0 | 20.0 | 16.7 | 17.6 |
| DEX0450_031.nt.2 | 21356.0 | 18.4 | 18.9 | 30.4 | 31.8 | 0.0 | 0.0 | 20.0 | 21.1 | 16.7 | 16.7 |
| DEX0450_032.nt.1 | 34888.0 | 18.4 | 18.4 | 26.1 | 26.1 | 6.7 | 6.7 | 20.0 | 20.0 | 16.7 | 16.7 |
| DEX0450_033.nt.1 | 30532.0 | 44.7 | 44.7 | 60.9 | 60.9 | 20.0 | 20.0 | 50.0 | 50.0 | 38.9 | 38.9 |
| DEX0450_033.nt.2 | 34642.0 | 23.7 | 30.0 | 30.4 | 43.8 | 13.3 | 14.3 | 25.0 | 31.2 | 22.2 | 28.6 |
| DEX0450_033.nt.2 | 34643.0 | 21.1 | 24.2 | 30.4 | 36.8 | 6.7 | 7.1 | 20.0 | 22.2 | 22.2 | 26.7 |
| DEX0450_034.nt.1 | 37498.0 | 7.9 | 7.9 | 8.7 | 8.7 | 6.7 | 6.7 | 5.0 | 5.0 | 11.1 | 11.1 |
| DEX0450_035.nt.1 | 20153.0 | 21.1 | 21.6 | 21.7 | 22.7 | 20.0 | 20.0 | 20.0 | 21.1 | 22.2 | 22.2 |
| DEX0450_035.nt.1 | 20154.0 | 7.9 | 7.9 | 4.3 | 4.3 | 13.3 | 13.3 | 15.0 | 15.0 | 0.0 | 0.0 |
| DEX0450_036.nt.1 | 37615.0 | 47.4 | 47.4 | 39.1 | 39.1 | 60.0 | 60.0 | 50.0 | 50.0 | 44.4 | 44.4 |
| DEX0450_036.nt.1 | 37616.0 | 44.7 | 44.7 | 34.8 | 34.8 | 60.0 | 60.0 | 45.0 | 45.0 | 44.4 | 44.4 |
| DEX0450_036.nt.1 | 37635.0 | 42.1 | 42.1 | 34.8 | 34.8 | 53.3 | 53.3 | 45.0 | 45.0 | 38.9 | 38.9 |
| DEX0450_037.nt.1 | 33741.0 | 44.7 | 47.2 | 39.1 | 42.9 | 53.3 | 53.3 | 50.0 | 50.0 | 38.9 | 43.8 |
| DEX0450_038.nt.1 | 38975.0 | 15.8 | 15.8 | 21.7 | 21.7 | 6.7 | 6.7 | 15.0 | 15.0 | 16.7 | 16.7 |
| DEX0450_038.nt.1 | 38976.0 | 18.4 | 18.4 | 17.4 | 17.4 | 20.0 | 20.0 | 15.0 | 15.0 | 22.2 | 22.2 |
| DEX0450_039.nt.1 | 38501.0 | 5.3 | 5.3 | 4.3 | 4.3 | 6.7 | 6.7 | 5.0 | 5.0 | 5.6 | 5.6 |
| DEX0450_039.nt.1 | 38502.0 | 5.3 | 5.3 | 4.3 | 4.3 | 6.7 | 6.7 | 5.0 | 5.0 | 5.6 | 5.6 |
| DEX0450_039.nt.2 | 36599.0 | 2.6 | 2.6 | 4.3 | 4.3 | 0.0 | 0.0 | 0.0 | 0.0 | 5.6 | 5.6 |
| DEX0450_039.nt.2 | 38428.0 | 7.9 | 7.9 | 4.3 | 4.3 | 13.3 | 13.3 | 5.0 | 5.0 | 11.1 | 11.1 |
| DEX0450_039.nt.2 | 38499.0 | 7.9 | 7.9 | 4.3 | 4.3 | 13.3 | 13.3 | 5.0 | 5.0 | 11.1 | 11.1 |
| DEX0450_039.nt.2 | 38501.0 | 5.3 | 5.3 | 4.3 | 4.3 | 6.7 | 6.7 | 5.0 | 5.0 | 5.6 | 5.6 |
| DEX0450_039.nt.2 | 38502.0 | 5.3 | 5.3 | 4.3 | 4.3 | 6.7 | 6.7 | 5.0 | 5.0 | 5.6 | 5.6 |
| DEX0450_039.nt.2 | 38509.0 | 5.3 | 5.3 | 4.3 | 4.3 | 6.7 | 6.7 | 0.0 | 0.0 | 11.1 | 11.1 |
| DEX0450_039.nt.2 | 38510.0 | 2.6 | 2.6 | 4.3 | 4.3 | 0.0 | 0.0 | 0.0 | 0.0 | 5.6 | 5.6 |
| DEX0450_039.nt.3 | 36599.0 | 2.6 | 2.6 | 4.3 | 4.3 | 0.0 | 0.0 | 0.0 | 0.0 | 5.6 | 5.6 |
| DEX0450_039.nt.3 | 38428.0 | 7.9 | 7.9 | 4.3 | 4.3 | 13.3 | 13.3 | 5.0 | 5.0 | 11.1 | 11.1 |
| DEX0450_039.nt.3 | 38499.0 | 7.9 | 7.9 | 4.3 | 4.3 | 13.3 | 13.3 | 5.0 | 5.0 | 11.1 | 11.1 |
| DEX0450_039.nt.3 | 38501.0 | 5.3 | 5.3 | 4.3 | 4.3 | 6.7 | 6.7 | 5.0 | 5.0 | 5.6 | 5.6 |
| DEX0450_039.nt.3 | 38509.0 | 5.3 | 5.3 | 4.3 | 4.3 | 6.7 | 6.7 | 0.0 | 0.0 | 11.1 | 11.1 |
| DEX0450_039.nt.3 | 38510.0 | 2.6 | 2.6 | 4.3 | 4.3 | 0.0 | 0.0 | 0.0 | 0.0 | 5.6 | 5.6 |
| DEX0450_039.nt.4 | 36599.0 | 2.6 | 2.6 | 4.3 | 4.3 | 0.0 | 0.0 | 0.0 | 0.0 | 5.6 | 5.6 |
| DEX0450_039.nt.4 | 38428.0 | 7.9 | 7.9 | 4.3 | 4.3 | 13.3 | 13.3 | 5.0 | 5.0 | 11.1 | 11.1 |
| DEX0450_039.nt.4 | 38499.0 | 7.9 | 7.9 | 4.3 | 4.3 | 13.3 | 13.3 | 5.0 | 5.0 | 11.1 | 11.1 |
| DEX0450_039.nt.4 | 38501.0 | 5.3 | 5.3 | 4.3 | 4.3 | 6.7 | 6.7 | 5.0 | 5.0 | 5.6 | 5.6 |
| DEX0450_039.nt.4 | 38502.0 | 5.3 | 5.3 | 4.3 | 4.3 | 6.7 | 6.7 | 5.0 | 5.0 | 5.6 | 5.6 |
| DEX0450_039.nt.4 | 38509.0 | 5.3 | 5.3 | 4.3 | 4.3 | 6.7 | 6.7 | 0.0 | 0.0 | 11.1 | 11.1 |
| DEX0450_039.nt.4 | 38510.0 | 2.6 | 2.6 | 4.3 | 4.3 | 0.0 | 0.0 | 0.0 | 0.0 | 5.6 | 5.6 |
| DEX0450_039.nt.5 | 38501.0 | 5.3 | 5.3 | 4.3 | 4.3 | 6.7 | 6.7 | 5.0 | 5.0 | 5.6 | 5.6 |
| DEX0450_039.nt.5 | 38502.0 | 5.3 | 5.3 | 4.3 | 4.3 | 6.7 | 6.7 | 5.0 | 5.0 | 5.6 | 5.6 |
| DEX0450_039.nt.6 | 38501.0 | 5.3 | 5.3 | 4.3 | 4.3 | 6.7 | 6.7 | 5.0 | 5.0 | 5.6 | 5.6 |
| DEX0450_039.nt.6 | 38502.0 | 5.3 | 5.3 | 4.3 | 4.3 | 6.7 | 6.7 | 5.0 | 5.0 | 5.6 | 5.6 |
| DEX0450_040.nt.1 | 35520.0 | 39.5 | 39.5 | 30.4 | 30.4 | 53.3 | 53.3 | 40.0 | 40.0 | 38.9 | 38.9 |
| DEX0450_040.nt.1 | 35521.0 | 42.1 | 42.1 | 34.8 | 34.8 | 53.3 | 53.3 | 40.0 | 40.0 | 44.4 | 44.4 |
| DEX0450_040.nt.1 | 39581.0 | 34.2 | 36.1 | 34.8 | 36.4 | 33.3 | 35.7 | 30.0 | 33.3 | 38.9 | 38.9 |
| DEX0450_040.nt.1 | 39582.0 | 42.1 | 42.1 | 34.8 | 34.8 | 53.3 | 53.3 | 40.0 | 40.0 | 44.4 | 44.4 |
| DEX0450_041.nt.1 | 33072.0 | 2.6 | 2.6 | 4.3 | 4.3 | 0.0 | 0.0 | 0.0 | 0.0 | 5.6 | 5.6 |
| DEX0450_041.nt.1 | 33074.0 | 18.4 | 18.9 | 26.1 | 26.1 | 6.7 | 7.1 | 10.0 | 10.0 | 27.8 | 29.4 |
| DEX0450_041.nt.1 | 33075.0 | 13.2 | 13.2 | 17.4 | 17.4 | 6.7 | 6.7 | 10.0 | 10.0 | 16.7 | 16.7 |
| DEX0450_041.nt.1 | 36755.0 | 5.3 | 5.9 | 4.3 | 4.5 | 6.7 | 8.3 | 0.0 | 0.0 | 11.1 | 13.3 |
| DEX0450_041.nt.1 | 36756.0 | 0.0 | 0.0 | 0.0 | 0.0 | 0.0 | 0.0 | 0.0 | 0.0 | 0.0 | 0.0 |
| DEX0450_041.nt.1 | 37290.0 | 5.3 | 5.3 | 8.7 | 8.7 | 0.0 | 0.0 | 5.0 | 5.0 | 5.6 | 5.6 |
| DEX0450_042.nt.1 | 33118.0 | 7.9 | 7.9 | 13.0 | 13.0 | 0.0 | 0.0 | 10.0 | 10.0 | 5.6 | 5.6 |
| DEX0450_042.nt.1 | 33119.0 | 5.3 | 5.3 | 8.7 | 8.7 | 0.0 | 0.0 | 5.0 | 5.0 | 5.6 | 5.6 |
| DEX0450_042.nt.1 | 34009.0 | 26.3 | 27.0 | 26.1 | 27.3 | 26.7 | 26.7 | 25.0 | 25.0 | 27.8 | 29.4 |
| DEX0450_042.nt.1 | 40737.0 | 13.2 | 13.2 | 21.7 | 21.7 | 0.0 | 0.0 | 10.0 | 10.0 | 16.7 | 16.7 |
| DEX0450_042.nt.2 | 33118.0 | 7.9 | 7.9 | 13.0 | 13.0 | 0.0 | 0.0 | 10.0 | 10.0 | 5.6 | 5.6 |
| DEX0450_042.nt.2 | 33119.0 | 5.3 | 5.3 | 8.7 | 8.7 | 0.0 | 0.0 | 5.0 | 5.0 | 5.6 | 5.6 |
| DEX0450_042.nt.2 | 34009.0 | 26.3 | 27.0 | 26.1 | 27.3 | 26.7 | 26.7 | 25.0 | 25.0 | 27.8 | 29.4 |
| DEX0450_042.nt.2 | 40737.0 | 13.2 | 13.2 | 21.7 | 21.7 | 0.0 | 0.0 | 10.0 | 10.0 | 16.7 | 16.7 |
| DEX0450_043.nt.1 | 35881.0 | 2.6 | 3.0 | 0.0 | 0.0 | 6.7 | 7.1 | 0.0 | 0.0 | 5.6 | 6.2 |
| DEX0450_043.nt.1 | 35882.0 | 2.6 | 14.3 | 4.3 | 20.0 | 0.0 | 0.0 | 5.0 | 25.0 | 0.0 | 0.0 |
| DEX0450_043.nt.1 | 36669.0 | 28.9 | 28.9 | 30.4 | 30.4 | 26.7 | 26.7 | 25.0 | 25.0 | 33.3 | 33.3 |
| DEX0450_043.nt.1 | 36670.0 | 28.9 | 28.9 | 30.4 | 30.4 | 26.7 | 26.7 | 25.0 | 25.0 | 33.3 | 33.3 |
| DEX0450_044.nt.1 | 9110.0 | 28.9 | 28.9 | 30.4 | 30.4 | 26.7 | 26.7 | 30.0 | 30.0 | 27.8 | 27.8 |
| DEX0450_045.nt.1 | 13783.0 | 15.8 | 15.8 | 21.7 | 21.7 | 6.7 | 6.7 | 20.0 | 20.0 | 11.1 | 11.1 |
| DEX0450_045.nt.1 | 13784.0 | 13.2 | 13.2 | 17.4 | 17.4 | 6.7 | 6.7 | 15.0 | 15.0 | 11.1 | 11.1 |
| DEX0450_046.nt.1 | 10297.0 | 63.2 | 63.2 | 73.9 | 73.9 | 46.7 | 46.7 | 65.0 | 65.0 | 61.1 | 61.1 |
| DEX0450_047.nt.1 | 30511.0 | 23.7 | 24.3 | 30.4 | 31.8 | 13.3 | 13.3 | 20.0 | 21.1 | 27.8 | 27.8 |
| DEX0450_047.nt.1 | 38789.0 | 7.9 | 7.9 | 4.3 | 4.3 | 13.3 | 13.3 | 5.0 | 5.0 | 11.1 | 11.1 |
| DEX0450_047.nt.1 | 39412.0 | 7.9 | 7.9 | 4.3 | 4.3 | 13.3 | 13.3 | 5.0 | 5.0 | 11.1 | 11.1 |
| DEX0450_048.nt.1 | 41177.0 | 7.9 | 7.9 | 13.0 | 13.0 | 0.0 | 0.0 | 5.0 | 5.0 | 11.1 | 11.1 |
| DEX0450_048.nt.1 | 41178.0 | 10.5 | 10.8 | 17.4 | 17.4 | 0.0 | 0.0 | 10.0 | 10.0 | 11.1 | 11.8 |
| DEX0450_049.nt.1 | 31424.0 | 10.5 | 11.8 | 13.0 | 13.6 | 6.7 | 8.3 | 10.0 | 11.1 | 11.1 | 12.5 |
| DEX0450_049.nt.1 | 31425.0 | 10.5 | 12.1 | 13.0 | 14.3 | 6.7 | 8.3 | 5.0 | 5.3 | 16.7 | 21.4 |
| DEX0450_050.nt.1 | 9398.0 | 26.3 | 26.3 | 30.4 | 30.4 | 20.0 | 20.0 | 30.0 | 30.0 | 22.2 | 22.2 |
| DEX0450_050.nt.1 | 9399.0 | 26.3 | 26.3 | 30.4 | 30.4 | 20.0 | 20.0 | 30.0 | 30.0 | 22.2 | 22.2 |
| DEX0450_052.nt.1 | 37943.0 | 52.6 | 52.6 | 56.5 | 56.5 | 46.7 | 46.7 | 50.0 | 50.0 | 55.6 | 55.6 |
| DEX0450_052.nt.1 | 37944.0 | 50.0 | 51.4 | 56.5 | 56.5 | 40.0 | 42.9 | 50.0 | 52.6 | 50.0 | 50.0 |
| DEX0450_053.nt.1 | 9398.0 | 26.3 | 26.3 | 30.4 | 30.4 | 20.0 | 20.0 | 30.0 | 30.0 | 22.2 | 22.2 |
| DEX0450_053.nt.1 | 9399.0 | 26.3 | 26.3 | 30.4 | 30.4 | 20.0 | 20.0 | 30.0 | 30.0 | 22.2 | 22.2 |

[0466] TABLE 2

| | | | | | | | | Cln | |
|---|---|---|---|---|---|---|---|---|---|
| | | | Cln | | Cln | Cln | Cln TS | NOT | |
| | | Cln | GR1, 2 | Cln | GR3 | TS | up | TS | Cln NOT |
| | | GR1, 2 | % valid | GR3 | % valid | up | % valid | up | TS up |
| | Oligo | % up | up | % up | up | % up | up | % up | % valid |
| DEX ID | Name | n = 28 | n = 28 | n = 10 | n = 10 | n = 13 | n = 13 | n = 25 | up n = 25 |
| DEX0450_002.nt.1 | 31003.0 | 0.0 | 0.0 | 20.0 | 22.2 | 15.4 | 15.4 | 0.0 | 0.0 |
| DEX0450_002.nt.1 | 31158.0 | 0.0 | 0.0 | 0.0 | 0.0 | 0.0 | 0.0 | 0.0 | 0.0 |
| DEX0450_002.nt.1 | 31159.0 | 0.0 | 0.0 | 40.0 | 40.0 | 23.1 | 23.1 | 4.0 | 4.0 |
| DEX0450_002.nt.1 | 31162.0 | 14.3 | 14.8 | 20.0 | 20.0 | 23.1 | 23.1 | 12.0 | 12.5 |
| DEx0450_002.nt.1 | 31163.0 | 3.6 | 3.6 | 20.0 | 20.0 | 15.4 | 15.4 | 4.0 | 4.0 |
| DEX0450_002.nt.1 | 34074.0 | 3.6 | 4.0 | 40.0 | 44.4 | 30.8 | 33.3 | 4.0 | 4.5 |
| DEX0450_002.nt.1 | 34075.0 | 0.0 | 0.0 | 10.0 | 11.1 | 7.7 | 7.7 | 0.0 | 0.0 |
| DEX0450_003.nt.1 | 31446.0 | 0.0 | 0.0 | 10.0 | 14.3 | 7.7 | 11.1 | 0.0 | 0.0 |
| DEX0450_003.nt.2 | 31447.0 | 0.0 | 0.0 | 0.0 | 0.0 | 0.0 | 0.0 | 0.0 | 0.0 |
| DEX0450_003.nt.3 | 31443.0 | 0.0 | 0.0 | 0.0 | 0.0 | 0.0 | 0.0 | 0.0 | 0.0 |
| DEX0450_003.nt.3 | 31447.0 | 0.0 | 0.0 | 0.0 | 0.0 | 0.0 | 0.0 | 0.0 | 0.0 |
| DEX0450_004.nt.1 | 10720.0 | 42.9 | 42.9 | 20.0 | 20.0 | 7.7 | 7.7 | 52.0 | 52.0 |
| DEX0450_004.nt.1 | 10721.0 | 46.4 | 46.4 | 10.0 | 10.0 | 15.4 | 15.4 | 48.0 | 48.0 |
| DEX0450_005.nt.1 | 16776.0 | 3.6 | 4.0 | 0.0 | 0.0 | 7.7 | 8.3 | 0.0 | 0.0 |
| DEX0450_005.nt.1 | 16777.0 | 0.0 | 0.0 | 0.0 | 0.0 | 0.0 | 0.0 | 0.0 | 0.0 |
| DEX0450_005.nt.1 | 38049.0 | 50.0 | 50.0 | 40.0 | 40.0 | 61.5 | 61.5 | 40.0 | 40.0 |
| DEX0450_005.nt.1 | 38050.0 | 60.7 | 60.7 | 40.0 | 40.0 | 61.5 | 61.5 | 52.0 | 52.0 |
| DEX0450_006.nt.1 | 35170.0 | 35.7 | 83.3 | 10.0 | 100.0 | 7.7 | 33.3 | 40.0 | 100.0 |
| DEX0450_006.nt.1 | 35171.0 | 28.6 | 47.1 | 0.0 | 0.0 | 7.7 | 16.7 | 28.0 | 50.0 |
| DEX0450_007.nt.1 | 35170.0 | 35.7 | 83.3 | 10.0 | 100.0 | 7.7 | 33.3 | 40.0 | 100.0 |
| DEX0450_007.nt.1 | 35171.0 | 28.6 | 47.1 | 0.0 | 0.0 | 7.7 | 16.7 | 28.0 | 50.0 |
| DEX0450_008.nt.1 | 30227.0 | 42.9 | 42.9 | 70.0 | 70.0 | 61.5 | 61.5 | 44.0 | 44.0 |
| DEX0450_008.nt.1 | 30228.0 | 35.7 | 35.7 | 70.0 | 70.0 | 53.8 | 53.8 | 40.0 | 40.0 |
| DEX0450_009.nt.1 | 39839.0 | 3.6 | 3.6 | 30.0 | 30.0 | 23.1 | 23.1 | 4.0 | 4.0 |
| DEX0450_009.nt.1 | 39840.0 | 3.6 | 3.7 | 30.0 | 30.0 | 23.1 | 23.1 | 4.0 | 4.2 |
| DEX0450_009.nt.2 | 39839.0 | 3.6 | 3.6 | 30.0 | 30.0 | 23.1 | 23.1 | 4.0 | 4.0 |
| DEX0450_009.nt.2 | 39840.0 | 3.6 | 3.7 | 30.0 | 30.0 | 23.1 | 23.1 | 4.0 | 4.2 |
| DEX0450_010.nt.1 | 29571.0 | 28.6 | 28.6 | 40.0 | 40.0 | 46.2 | 46.2 | 24.0 | 24.0 |
| DEX0450_010.nt.1 | 29582.0 | 46.4 | 46.4 | 70.0 | 70.0 | 61.5 | 61.5 | 48.0 | 48.0 |
| DEX0450_010.nt.1 | 29595.0 | 50.0 | 50.0 | 60.0 | 60.0 | 69.2 | 69.2 | 44.0 | 44.0 |
| DEX0450_010.nt.1 | 29609.0 | 46.4 | 46.4 | 50.0 | 50.0 | 61.5 | 61.5 | 40.0 | 40.0 |
| DEX0450_010.nt.1 | 29611.0 | 50.0 | 50.0 | 60.0 | 60.0 | 69.2 | 69.2 | 44.0 | 44.0 |
| DEX0450_010.nt.1 | 29612.0 | 50.0 | 50.0 | 50.0 | 50.0 | 69.2 | 69.2 | 40.0 | 40.0 |
| DEX0450_010.nt.2 | 29582.0 | 46.4 | 46.4 | 70.0 | 70.0 | 61.5 | 61.5 | 48.0 | 48.0 |
| DEX0450_010.nt.2 | 29595.0 | 50.0 | 50.0 | 60.0 | 60.0 | 69.2 | 69.2 | 44.0 | 44.0 |
| DEX0450_010.nt.2 | 29609.0 | 46.4 | 46.4 | 50.0 | 50.0 | 61.5 | 61.5 | 40.0 | 40.0 |
| DEX0450_010.nt.2 | 29611.0 | 50.0 | 50.0 | 60.0 | 60.0 | 69.2 | 69.2 | 44.0 | 44.0 |
| DEX0450_010.nt.2 | 29612.0 | 50.0 | 50.0 | 50.0 | 50.0 | 69.2 | 69.2 | 40.0 | 40.0 |
| DEX0450_010.nt.3 | 29571.0 | 28.6 | 28.6 | 40.0 | 40.0 | 46.2 | 46.2 | 24.0 | 24.0 |
| DEX0450_010.nt.3 | 29572.0 | 7.1 | 7.1 | 0.0 | 0.0 | 7.7 | 7.7 | 4.0 | 4.0 |
| DEX0450_010.nt.3 | 29582.0 | 46.4 | 46.4 | 70.0 | 70.0 | 61.5 | 61.5 | 48.0 | 48.0 |
| DEX0450_010.nt.3 | 29595.0 | 50.0 | 50.0 | 60.0 | 60.0 | 69.2 | 69.2 | 44.0 | 44.0 |
| DEX0450_010.nt.3 | 29609.0 | 46.4 | 46.4 | 50.0 | 50.0 | 61.5 | 61.5 | 40.0 | 40.0 |
| DEX0450_010.nt.3 | 29611.0 | 50.0 | 50.0 | 60.0 | 60.0 | 69.2 | 69.2 | 44.0 | 44.0 |
| DEX0450_010.nt.3 | 29612.0 | 50.0 | 50.0 | 50.0 | 50.0 | 69.2 | 69.2 | 40.0 | 40.0 |
| DEX0450_010.nt.3 | 36747.0 | 0.0 | 0.0 | 0.0 | 0.0 | 0.0 | 0.0 | 0.0 | 0.0 |
| DEX0450_011.nt.1 | 22654.0 | 3.6 | 3.6 | 30.0 | 30.0 | 15.4 | 15.4 | 8.0 | 8.0 |
| DEX0450_012.nt.1 | 8377.0 | 10.7 | 10.7 | 20.0 | 20.0 | 30.8 | 30.8 | 4.0 | 4.0 |
| DEX0450_013.nt.1 | 32220.0 | 42.9 | 42.9 | 60.0 | 60.0 | 53.8 | 53.8 | 44.0 | 44.0 |
| DEX0450_013.nt.1 | 32221.0 | 57.1 | 59.3 | 70.0 | 77.8 | 84.6 | 84.6 | 48.0 | 52.2 |
| DEX0450_013.nt.1 | 32254.0 | 0.0 | 0.0 | 0.0 | 0.0 | 0.0 | 0.0 | 0.0 | 0.0 |
| DEX0450_013.nt.1 | 32255.0 | 0.0 | 0.0 | 0.0 | 0.0 | 0.0 | 0.0 | 0.0 | 0.0 |
| DEX0450_013.nt.1 | 33033.0 | 0.0 | 0.0 | 0.0 | 0.0 | 0.0 | 0.0 | 0.0 | 0.0 |
| DEX0450_014.nt.1 | 32458.0 | 0.0 | 0.0 | 0.0 | 0.0 | 0.0 | 0.0 | 0.0 | 0.0 |
| DEX0450_014.nt.1 | 32459.0 | 3.6 | 3.7 | 10.0 | 10.0 | 7.7 | 7.7 | 4.0 | 4.2 |
| DEX0450_015.nt.1 | 33503.0 | 14.3 | 14.8 | 30.0 | 30.0 | 38.5 | 38.5 | 8.0 | 8.3 |
| DEX0450_016.nt.1 | 33083.0 | 7.1 | 7.1 | 0.0 | 0.0 | 0.0 | 0.0 | 8.0 | 8.0 |
| DEX0450_016.nt.1 | 35091.0 | 28.6 | 28.6 | 0.0 | 0.0 | 38.5 | 38.5 | 12.0 | 12.0 |
| DEX0450_016.nt.2 | 33083.0 | 7.1 | 7.1 | 0.0 | 0.0 | 0.0 | 0.0 | 8.0 | 8.0 |
| DEX0450_016.nt.2 | 35091.0 | 28.6 | 28.6 | 0.0 | 0.0 | 38.5 | 38.5 | 12.0 | 12.0 |
| DEX0450_016.nt.3 | 33083.0 | 7.1 | 7.1 | 0.0 | 0.0 | 0.0 | 0.0 | 8.0 | 8.0 |
| DEX0450_016.nt.3 | 35091.0 | 28.6 | 28.6 | 0.0 | 0.0 | 38.5 | 38.5 | 12.0 | 12.0 |
| DEX0450_017.nt.1 | 36711.0 | 0.0 | 0.0 | 10.0 | 10.0 | 7.7 | 7.7 | 0.0 | 0.0 |
| DEX0450_017.nt.1 | 36712.0 | 0.0 | 0.0 | 10.0 | 10.0 | 7.7 | 8.3 | 0.0 | 0.0 |
| DEX0450_017.nt.1 | 39631.0 | 0.0 | 0.0 | 10.0 | 10.0 | 7.7 | 7.7 | 0.0 | 0.0 |
| DEX0450_017.nt.1 | 39635.0 | 0.0 | 0.0 | 20.0 | 20.0 | 7.7 | 7.7 | 4.0 | 4.0 |
| DEX0450_017.nt.1 | 39636.0 | 0.0 | 0.0 | 10.0 | 10.0 | 7.7 | 7.7 | 0.0 | 0.0 |
| DEX0450_017.nt.1 | 39769.0 | 7.1 | 7.1 | 30.0 | 30.0 | 23.1 | 23.1 | 8.0 | 8.0 |
| DEX0450_017.nt.1 | 39770.0 | 0.0 | 0.0 | 20.0 | 20.0 | 7.7 | 7.7 | 4.0 | 4.0 |
| DEX0450_017.nt.2 | 36711.0 | 0.0 | 0.0 | 10.0 | 10.0 | 7.7 | 7.7 | 0.0 | 0.0 |
| DEX0450_017.nt.2 | 39631.0 | 0.0 | 0.0 | 10.0 | 10.0 | 7.7 | 7.7 | 0.0 | 0.0 |
| DEX0450_017.nt.2 | 39635.0 | 0.0 | 0.0 | 20.0 | 20.0 | 7.7 | 7.7 | 4.0 | 4.0 |
| DEX0450_017.nt.2 | 39636.0 | 0.0 | 0.0 | 10.0 | 10.0 | 7.7 | 7.7 | 0.0 | 0.0 |
| DEX0450_017.nt.2 | 39769.0 | 7.1 | 7.1 | 30.0 | 30.0 | 23.1 | 23.1 | 8.0 | 8.0 |
| DEX0450_017.nt.2 | 39770.0 | 0.0 | 0.0 | 20.0 | 20.0 | 7.7 | 7.7 | 4.0 | 4.0 |
| DEX0450_017.nt.3 | 39631.0 | 0.0 | 0.0 | 10.0 | 10.0 | 7.7 | 7.7 | 0.0 | 0.0 |
| DEX0450_017.nt.3 | 39635.0 | 0.0 | 0.0 | 20.0 | 20.0 | 7.7 | 7.7 | 4.0 | 4.0 |
| DEX0450_017.nt.3 | 39636.0 | 0.0 | 0.0 | 10.0 | 10.0 | 7.7 | 7.7 | 0.0 | 0.0 |
| DEX0450_017.nt.3 | 39769.0 | 7.1 | 7.1 | 30.0 | 30.0 | 23.1 | 23.1 | 8.0 | 8.0 |
| DEX0450_018.nt.1 | 31424.0 | 7.1 | 8.0 | 20.0 | 22.2 | 23.1 | 23.1 | 4.0 | 4.8 |
| DEX0450_018.nt.1 | 31425.0 | 3.6 | 4.0 | 30.0 | 37.5 | 30.8 | 30.8 | 0.0 | 0.0 |
| DEX0450_018.nt.2 | 31424.0 | 7.1 | 8.0 | 20.0 | 22.2 | 23.1 | 23.1 | 4.0 | 4.8 |
| DEX0450_018.nt.2 | 31425.0 | 3.6 | 4.0 | 30.0 | 37.5 | 30.8 | 30.8 | 0.0 | 0.0 |
| DEX0450_018.nt.3 | 31424.0 | 7.1 | 8.0 | 20.0 | 22.2 | 23.1 | 23.1 | 4.0 | 4.8 |
| DEX0450_018.nt.3 | 31425.0 | 3.6 | 4.0 | 30.0 | 37.5 | 30.8 | 30.8 | 0.0 | 0.0 |
| DEX0450_019.nt.1 | 32748.0 | 0.0 | 0.0 | 0.0 | 0.0 | 0.0 | 0.0 | 0.0 | 0.0 |
| DEX0450_019.nt.1 | 33066.0 | 10.7 | 10.7 | 10.0 | 10.0 | 15.4 | 15.4 | 8.0 | 8.0 |
| DEX0450_019.nt.1 | 33067.0 | 14.3 | 14.3 | 20.0 | 20.0 | 30.8 | 30.8 | 8.0 | 8.0 |
| DEX0450_019.nt.1 | 35570.0 | 14.3 | 14.8 | 20.0 | 20.0 | 30.8 | 30.8 | 8.0 | 8.3 |
| DEX0450_019.nt.1 | 35571.0 | 14.3 | 14.3 | 30.0 | 30.0 | 30.8 | 30.8 | 12.0 | 12.0 |
| DEX0450_019.nt.2 | 32748.0 | 0.0 | 0.0 | 0.0 | 0.0 | 0.0 | 0.0 | 0.0 | 0.0 |
| DEX0450_019.nt.2 | 33066.0 | 10.7 | 10.7 | 10.0 | 10.0 | 15.4 | 15.4 | 8.0 | 8.0 |
| DEX0450_019.nt.2 | 33067.0 | 14.3 | 14.3 | 20.0 | 20.0 | 30.8 | 30.8 | 8.0 | 8.0 |
| DEX0450_019.nt.2 | 35570.0 | 14.3 | 14.8 | 20.0 | 20.0 | 30.8 | 30.8 | 8.0 | 8.3 |
| DEX0450_019.nt.2 | 35571.0 | 14.3 | 14.3 | 30.0 | 30.0 | 30.8 | 30.8 | 12.0 | 12.0 |
| DEX0450_019.nt.3 | 32748.0 | 0.0 | 0.0 | 0.0 | 0.0 | 0.0 | 0.0 | 0.0 | 0.0 |
| DEX0450_019.nt.3 | 33066.0 | 10.7 | 10.7 | 10.0 | 10.0 | 15.4 | 15.4 | 8.0 | 8.0 |
| DEX0450_019.nt.3 | 33067.0 | 14.3 | 14.3 | 20.0 | 20.0 | 30.8 | 30.8 | 8.0 | 8.0 |
| DEX0450_019.nt.3 | 35570.0 | 14.3 | 14.8 | 20.0 | 20.0 | 30.8 | 30.8 | 8.0 | 8.3 |
| DEX0450_019.nt.3 | 35571.0 | 14.3 | 14.3 | 30.0 | 30.0 | 30.8 | 30.8 | 12.0 | 12.0 |
| DEX0450_020.nt.1 | 32972.0 | 0.0 | 0.0 | 30.0 | 30.0 | 15.4 | 15.4 | 4.0 | 4.0 |
| DEX0450_020.nt.1 | 32990.0 | 0.0 | 0.0 | 20.0 | 20.0 | 7.7 | 7.7 | 4.0 | 4.0 |
| DEX0450_020.nt.1 | 32991.0 | 0.0 | 0.0 | 20.0 | 20.0 | 7.7 | 7.7 | 4.0 | 4.0 |
| DEX0450_020.nt.1 | 32992.0 | 3.6 | 3.6 | 20.0 | 20.0 | 7.7 | 7.7 | 8.0 | 8.0 |
| DEX0450_020.nt.1 | 32994.0 | 0.0 | 0.0 | 20.0 | 20.0 | 7.7 | 7.7 | 4.0 | 4.0 |
| DEX0450_020.nt.1 | 32995.0 | 0.0 | 0.0 | 20.0 | 20.0 | 7.7 | 7.7 | 4.0 | 4.0 |
| DEX0450_020.nt.1 | 35546.0 | 3.6 | 3.6 | 20.0 | 20.0 | 7.7 | 7.7 | 8.0 | 8.0 |
| DEX0450_020.nt.2 | 32972.0 | 0.0 | 0.0 | 30.0 | 30.0 | 15.4 | 15.4 | 4.0 | 4.0 |
| DEX0450_020.nt.2 | 32990.0 | 0.0 | 0.0 | 20.0 | 20.0 | 7.7 | 7.7 | 4.0 | 4.0 |
| DEX0450_020.nt.2 | 32991.0 | 0.0 | 0.0 | 20.0 | 20.0 | 7.7 | 7.7 | 4.0 | 4.0 |
| DEX0450_020.nt.2 | 32992.0 | 3.6 | 3.6 | 20.0 | 20.0 | 7.7 | 7.7 | 8.0 | 8.0 |
| DEX0450_020.nt.2 | 32995.0 | 0.0 | 0.0 | 20.0 | 20.0 | 7.7 | 7.7 | 4.0 | 4.0 |
| DEX0450_020.nt.2 | 35546.0 | 3.6 | 3.6 | 20.0 | 20.0 | 7.7 | 7.7 | 8.0 | 8.0 |
| DEX0450_020.nt.3 | 32972.0 | 0.0 | 0.0 | 30.0 | 30.0 | 15.4 | 15.4 | 4.0 | 4.0 |
| DEX0450_020.nt.3 | 32990.0 | 0.0 | 0.0 | 20.0 | 20.0 | 7.7 | 7.7 | 4.0 | 4.0 |
| DEX0450_020.nt.3 | 32991.0 | 0.0 | 0.0 | 20.0 | 20.0 | 7.7 | 7.7 | 4.0 | 4.0 |
| DEX0450_020.nt.3 | 32992.0 | 3.6 | 3.6 | 20.0 | 20.0 | 7.7 | 7.7 | 8.0 | 8.0 |
| DEX0450_020.nt.3 | 32995.0 | 0.0 | 0.0 | 20.0 | 20.0 | 7.7 | 7.7 | 4.0 | 4.0 |
| DEX0450_020.nt.3 | 35546.0 | 3.6 | 3.6 | 20.0 | 20.0 | 7.7 | 7.7 | 8.0 | 8.0 |
| DEX0450_021.nt.1 | 10700.0 | 3.6 | 5.9 | 0.0 | 0.0 | 7.7 | 10.0 | 0.0 | 0.0 |
| DEX0450_021.nt.1 | 10701.0 | 0.0 | 0.0 | 10.0 | 12.5 | 7.7 | 9.1 | 0.0 | 0.0 |
| DEX0450_021.nt.1 | 10744.0 | 10.7 | 11.5 | 30.0 | 33.3 | 30.8 | 30.8 | 8.0 | 9.1 |
| DEX0450_021.nt.1 | 10745.0 | 3.6 | 4.3 | 10.0 | 12.5 | 15.4 | 16.7 | 0.0 | 0.0 |
| DEX0450_022.nt.1 | 12057.0 | 3.6 | 3.8 | 30.0 | 30.0 | 30.8 | 30.8 | 0.0 | 0.0 |
| DEX0450_022.nt.1 | 12058.0 | 0.0 | 0.0 | 10.0 | 10.0 | 7.7 | 7.7 | 0.0 | 0.0 |
| DEX0450_023.nt.1 | 8910.0 | 25.0 | 25.0 | 30.0 | 30.0 | 53.8 | 53.8 | 12.0 | 12.0 |
| DEX0450_024.nt.1 | 36564.0 | 28.6 | 28.6 | 50.0 | 50.0 | 61.5 | 61.5 | 20.0 | 20.0 |
| DEX0450_025.nt.1 | 37705.0 | 28.6 | 28.6 | 20.0 | 20.0 | 15.4 | 15.4 | 32.0 | 32.0 |
| DEX0450_025.nt.1 | 37706.0 | 25.0 | 25.0 | 10.0 | 10.0 | 7.7 | 7.7 | 28.0 | 28.0 |
| DEX0450_027.nt.1 | 35470.0 | 32.1 | 32.1 | 40.0 | 40.0 | 30.8 | 30.8 | 36.0 | 36.0 |
| DEX0450_027.nt.1 | 35471.0 | 42.9 | 42.9 | 40.0 | 40.0 | 38.5 | 38.5 | 44.0 | 44.0 |
| DEX0450_027.nt.2 | 35470.0 | 32.1 | 32.1 | 40.0 | 40.0 | 30.8 | 30.8 | 36.0 | 36.0 |
| DEX0450_027.nt.2 | 35471.0 | 42.9 | 42.9 | 40.0 | 40.0 | 38.5 | 38.5 | 44.0 | 44.0 |
| DEX0450_028.nt.1 | 31539.0 | 0.0 | 0.0 | 0.0 | 0.0 | 0.0 | 0.0 | 0.0 | 0.0 |
| DEX0450_028.nt.1 | 31545.0 | 7.1 | 7.1 | 30.0 | 30.0 | 30.8 | 30.8 | 4.0 | 4.0 |
| DEX0450_030.nt.1 | 8410.0 | 14.3 | 14.3 | 10.0 | 10.0 | 30.8 | 30.8 | 4.0 | 4.0 |
| DEX0450_030.nt.1 | 8411.0 | 14.3 | 14.3 | 10.0 | 10.0 | 30.8 | 30.8 | 4.0 | 4.0 |
| DEX0450_031.nt.1 | 21356.0 | 17.9 | 17.9 | 20.0 | 22.2 | 15.4 | 16.7 | 20.0 | 20.0 |
| DEX0450_031.nt.1 | 28423.0 | 10.7 | 11.1 | 40.0 | 40.0 | 23.1 | 23.1 | 16.0 | 16.7 |
| DEX0450_031.nt.2 | 21356.0 | 17.9 | 17.9 | 20.0 | 22.2 | 15.4 | 16.7 | 20.0 | 20.0 |
| DEX0450_032.nt.1 | 34888.0 | 14.3 | 14.3 | 30.0 | 30.0 | 38.5 | 38.5 | 8.0 | 8.0 |
| DEX0450_033.nt.1 | 30532.0 | 35.7 | 35.7 | 70.0 | 70.0 | 61.5 | 61.5 | 36.0 | 36.0 |
| DEX0450_033.nt.2 | 34642.0 | 21.4 | 25.0 | 30.0 | 50.0 | 23.1 | 33.3 | 24.0 | 28.6 |
| DEX0450_033.nt.2 | 34643.0 | 10.7 | 12.0 | 50.0 | 62.5 | 7.7 | 10.0 | 28.0 | 30.4 |
| DEX0450_034.nt.1 | 37498.0 | 0.0 | 0.0 | 30.0 | 30.0 | 23.1 | 23.1 | 0.0 | 0.0 |
| DEX0450_035.nt.1 | 20153.0 | 14.3 | 14.8 | 40.0 | 40.0 | 38.5 | 38.5 | 12.0 | 12.5 |
| DEX0450_035.nt.1 | 20154.0 | 10.7 | 10.7 | 0.0 | 0.0 | 7.7 | 7.7 | 8.0 | 8.0 |
| DEX0450_036.nt.1 | 37615.0 | 46.4 | 46.4 | 50.0 | 50.0 | 30.8 | 30.8 | 56.0 | 56.0 |
| DEX0450_036.nt.1 | 37616.0 | 42.9 | 42.9 | 50.0 | 50.0 | 30.8 | 30.8 | 52.0 | 52.0 |
| DEX0450_036.nt.1 | 37635.0 | 39.3 | 39.3 | 50.0 | 50.0 | 23.1 | 23.1 | 52.0 | 52.0 |
| DEX0450_037.nt.1 | 33741.0 | 46.4 | 48.1 | 40.0 | 44.4 | 23.1 | 27.3 | 56.0 | 56.0 |
| DEX0450_038.nt.1 | 38975.0 | 14.3 | 14.3 | 20.0 | 20.0 | 15.4 | 15.4 | 16.0 | 16.0 |
| DEX0450_038.nt.1 | 38976.0 | 14.3 | 14.3 | 30.0 | 30.0 | 15.4 | 15.4 | 20.0 | 20.0 |
| DEX0450_039.nt.1 | 38501.0 | 7.1 | 7.1 | 0.0 | 0.0 | 15.4 | 15.4 | 0.0 | 0.0 |
| DEX0450_039.nt.1 | 38502.0 | 7.1 | 7.1 | 0.0 | 0.0 | 15.4 | 15.4 | 0.0 | 0.0 |
| DEX0450_039.nt.2 | 36599.0 | 3.6 | 3.6 | 0.0 | 0.0 | 7.7 | 7.7 | 0.0 | 0.0 |
| DEX0450_039.nt.2 | 38428.0 | 10.7 | 10.7 | 0.0 | 0.0 | 15.4 | 15.4 | 4.0 | 4.0 |
| DEX0450_039.nt.2 | 38499.0 | 10.7 | 10.7 | 0.0 | 0.0 | 15.4 | 15.4 | 4.0 | 4.0 |
| DEX0450_039.nt.2 | 38501.0 | 7.1 | 7.1 | 0.0 | 0.0 | 15.4 | 15.4 | 0.0 | 0.0 |
| DEX0450_039.nt.2 | 38502.0 | 7.1 | 7.1 | 0.0 | 0.0 | 15.4 | 15.4 | 0.0 | 0.0 |
| DEX0450_039.nt.2 | 38509.0 | 7.1 | 7.1 | 0.0 | 0.0 | 7.7 | 7.7 | 4.0 | 4.0 |
| DEX0450_039.nt.2 | 38510.0 | 3.6 | 3.6 | 0.0 | 0.0 | 7.7 | 7.7 | 0.0 | 0.0 |
| DEX0450_039.nt.3 | 36599.0 | 3.6 | 3.6 | 0.0 | 0.0 | 7.7 | 7.7 | 0.0 | 0.0 |
| DEX0450_039.nt.3 | 38428.0 | 10.7 | 10.7 | 0.0 | 0.0 | 15.4 | 15.4 | 4.0 | 4.0 |
| DEX0450_039.nt.3 | 38499.0 | 10.7 | 10.7 | 0.0 | 0.0 | 15.4 | 15.4 | 4.0 | 4.0 |
| DEX0450_039.nt.3 | 38501.0 | 7.1 | 7.1 | 0.0 | 0.0 | 15.4 | 15.4 | 0.0 | 0.0 |
| DEX0450_039.nt.3 | 38509.0 | 7.1 | 7.1 | 0.0 | 0.0 | 7.7 | 7.7 | 4.0 | 4.0 |
| DEX0450_039.nt.3 | 38510.0 | 3.6 | 3.6 | 0.0 | 0.0 | 7.7 | 7.7 | 0.0 | 0.0 |
| DEX0450_039.nt.4 | 36599.0 | 3.6 | 3.6 | 0.0 | 0.0 | 7.7 | 7.7 | 0.0 | 0.0 |
| DEX0450_039.nt.4 | 38428.0 | 10.7 | 10.7 | 0.0 | 0.0 | 15.4 | 15.4 | 4.0 | 4.0 |
| DEX0450_039.nt.4 | 38499.0 | 10.7 | 10.7 | 0.0 | 0.0 | 15.4 | 15.4 | 4.0 | 4.0 |
| DEX0450_039.nt.4 | 38501.0 | 7.1 | 7.1 | 0.0 | 0.0 | 15.4 | 15.4 | 0.0 | 0.0 |
| DEX0450_039.nt.4 | 38502.0 | 7.1 | 7.1 | 0.0 | 0.0 | 15.4 | 15.4 | 0.0 | 0.0 |
| DEX0450_039.nt.4 | 38509.0 | 7.1 | 7.1 | 0.0 | 0.0 | 7.7 | 7.7 | 4.0 | 4.0 |
| DEX0450_039.nt.4 | 38510.0 | 3.6 | 3.6 | 0.0 | 0.0 | 7.7 | 7.7 | 0.0 | 0.0 |
| DEX0450_039.nt.5 | 38501.0 | 7.1 | 7.1 | 0.0 | 0.0 | 15.4 | 15.4 | 0.0 | 0.0 |
| DEX0450_039.nt.5 | 38502.0 | 7.1 | 7.1 | 0.0 | 0.0 | 15.4 | 15.4 | 0.0 | 0.0 |
| DEX0450_039.nt.6 | 38501.0 | 7.1 | 7.1 | 0.0 | 0.0 | 15.4 | 15.4 | 0.0 | 0.0 |
| DEX0450_039.nt.6 | 38502.0 | 7.1 | 7.1 | 0.0 | 0.0 | 15.4 | 15.4 | 0.0 | 0.0 |
| DEX0450_040.nt.1 | 35520.0 | 46.4 | 46.4 | 20.0 | 20.0 | 46.2 | 46.2 | 36.0 | 36.0 |
| DEX0450_040.nt.1 | 35521.0 | 46.4 | 46.4 | 30.0 | 30.0 | 53.8 | 53.8 | 36.0 | 36.0 |
| DEX0450_040.nt.1 | 39581.0 | 35.7 | 38.5 | 30.0 | 30.0 | 46.2 | 50.0 | 28.0 | 29.2 |
| DEX0450_040.nt.1 | 39582.0 | 46.4 | 46.4 | 30.0 | 30.0 | 53.8 | 53.8 | 36.0 | 36.0 |
| DEX0450_041.nt.1 | 33072.0 | 0.0 | 0.0 | 10.0 | 10.0 | 0.0 | 0.0 | 4.0 | 4.0 |
| DEX0450_041.nt.1 | 33074.0 | 7.1 | 7.4 | 50.0 | 50.0 | 38.5 | 38.5 | 8.0 | 8.3 |
| DEX0450_041.nt.1 | 33075.0 | 3.6 | 3.6 | 40.0 | 40.0 | 30.8 | 30.8 | 4.0 | 4.0 |
| DEX0450_041.nt.1 | 36755.0 | 0.0 | 0.0 | 20.0 | 20.0 | 15.4 | 15.4 | 0.0 | 0.0 |
| DEX0450_041.nt.1 | 36756.0 | 0.0 | 0.0 | 0.0 | 0.0 | 0.0 | 0.0 | 0.0 | 0.0 |
| DEX0450_041.nt.1 | 37290.0 | 3.6 | 3.6 | 10.0 | 10.0 | 7.7 | 7.7 | 4.0 | 4.0 |
| DEX0450_042.nt.1 | 33118.0 | 3.6 | 3.6 | 20.0 | 20.0 | 23.1 | 23.1 | 0.0 | 0.0 |
| DEX0450_042.nt.1 | 33119.0 | 3.6 | 3.6 | 10.0 | 10.0 | 15.4 | 15.4 | 0.0 | 0.0 |
| DEX0450_042.nt.1 | 34009.0 | 21.4 | 21.4 | 40.0 | 44.4 | 53.8 | 53.8 | 12.0 | 12.5 |
| DEX0450_042.nt.1 | 40737.0 | 10.7 | 10.7 | 20.0 | 20.0 | 30.8 | 30.8 | 4.0 | 4.0 |
| DEX0450_042.nt.2 | 33118.0 | 3.6 | 3.6 | 20.0 | 20.0 | 23.1 | 23.1 | 0.0 | 0.0 |
| DEX0450_042.nt.2 | 33119.0 | 3.6 | 3.6 | 10.0 | 10.0 | 15.4 | 15.4 | 0.0 | 0.0 |
| DEX0450_042.nt.2 | 34009.0 | 21.4 | 21.4 | 40.0 | 44.4 | 53.8 | 53.8 | 12.0 | 12.5 |
| DEX0450_042.nt.2 | 40737.0 | 10.7 | 10.7 | 20.0 | 20.0 | 30.8 | 30.8 | 4.0 | 4.0 |
| DEX0450_043.nt.1 | 35881.0 | 0.0 | 0.0 | 10.0 | 12.5 | 7.7 | 9.1 | 0.0 | 0.0 |
| DEX0450_043.nt.1 | 35882.0 | 3.6 | 25.0 | 0.0 | 0.0 | 0.0 | 0.0 | 4.0 | 25.0 |
| DEX0450_043.nt.1 | 36669.0 | 25.0 | 25.0 | 40.0 | 40.0 | 38.5 | 38.5 | 24.0 | 24.0 |
| DEX0450_043.nt.1 | 36670.0 | 25.0 | 25.0 | 40.0 | 40.0 | 38.5 | 38.5 | 24.0 | 24.0 |
| DEX0450_044.nt.1 | 9110.0 | 28.6 | 28.6 | 30.0 | 30.0 | 23.1 | 23.1 | 32.0 | 32.0 |
| DEX0450_045.nt.1 | 13783.0 | 14.3 | 14.3 | 20.0 | 20.0 | 30.8 | 30.8 | 8.0 | 8.0 |
| DEX0450_045.nt.1 | 13784.0 | 14.3 | 14.3 | 10.0 | 10.0 | 30.8 | 30.8 | 4.0 | 4.0 |
| DEX0450_046.nt.1 | 10297.0 | 53.6 | 53.6 | 90.0 | 90.0 | 84.6 | 84.6 | 52.0 | 52.0 |
| DEX0450_047.nt.1 | 30511.0 | 14.3 | 14.8 | 50.0 | 50.0 | 53.8 | 53.8 | 8.0 | 8.3 |
| DEX0450_047.nt.1 | 38789.0 | 7.1 | 7.1 | 10.0 | 10.0 | 15.4 | 15.4 | 4.0 | 4.0 |
| DEX0450_047.nt.1 | 39412.0 | 7.1 | 7.1 | 10.0 | 10.0 | 15.4 | 15.4 | 4.0 | 4.0 |
| DEX0450_048.nt.1 | 41177.0 | 3.6 | 3.6 | 20.0 | 20.0 | 15.4 | 15.4 | 4.0 | 4.0 |
| DEX0450_048.nt.1 | 41178.0 | 3.6 | 3.7 | 30.0 | 30.0 | 23.1 | 23.1 | 4.0 | 4.2 |
| DEX0450_049.nt.1 | 31424.0 | 7.1 | 8.0 | 20.0 | 22.2 | 23.1 | 23.1 | 4.0 | 4.8 |
| DEX0450_049.nt.1 | 31425.0 | 3.6 | 4.0 | 30.0 | 37.5 | 30.8 | 30.8 | 0.0 | 0.0 |
| DEX0450_050.nt.1 | 9398.0 | 28.6 | 28.6 | 20.0 | 20.0 | 30.8 | 30.8 | 24.0 | 24.0 |
| DEX0450_050.nt.1 | 9399.0 | 28.6 | 28.6 | 20.0 | 20.0 | 30.8 | 30.8 | 24.0 | 24.0 |
| DEX0450_052.nt.1 | 37943.0 | 46.4 | 46.4 | 70.0 | 70.0 | 76.9 | 76.9 | 40.0 | 40.0 |
| DEX0450_052.nt.1 | 37944.0 | 42.9 | 44.4 | 70.0 | 70.0 | 76.9 | 76.9 | 36.0 | 37.5 |
| DEX0450_053.nt.1 | 9398.0 | 28.6 | 28.6 | 20.0 | 20.0 | 30.8 | 30.8 | 24.0 | 24.0 |
| DEX0450_053.nt.1 | 9399.0 | 28.6 | 28.6 | 20.0 | 20.0 | 30.8 | 30.8 | 24.0 | 24.0 |

[0467] TABLE 3

| | | | Cln | | Cln | | Cln |
|---|---|---|---|---|---|---|---|
| | | Cln | Multi- | Cln | Multi- | Cln | Multi- |
| | | Multi- | Cancer | Multi- | Cancer | Multi- | Cancer |
| | | Cancer | ALL | Cancer | ASC | Cancer | RS |
| | Oligo | ALL % up | % valid | ASC % up | % valid | RS % up | % valid |
| DEX ID | Name | n = 27 | up n = 27 | n = 14 | up n = 14 | n = 13 | up n = 13 |
| DEX0450_025.nt.1 | 77759.0 | 37.0 | 37.0 | 21.4 | 21.4 | 53.8 | 53.8 |
| DEX0450_025.nt.1 | 77759.1 | 33.3 | 33.3 | 21.4 | 21.4 | 46.2 | 46.2 |
| DEX0450_031.nt.1 | 956.0 | 7.4 | 8.3 | 14.3 | 15.4 | 0.0 | 0.0 |

[0468] Breast Cancer Chips

[0469] For breast cancer two different chip designs were evaluated with overlapping sets of a total of 36 samples, comparing the expression patterns of breast cancer derived polyA+RNA to polyA+RNA isolated from a pool of 10 normal breast tissues. For the Breast Array Chip, all 36 samples (9 stage I cancers, 23 stage II cancers, 4 stage III cancers) were analyzed. These samples also represented 10 Grade ½ and 26 Grade 3 cancers. The histopathologic grades for cancer are classified as follows: GX, cannot be assessed; G1, well differentiated; G2, moderately differentiated; G3, poorly differentiated; and G4, undifferentiated. AJCC Cancer Staging Handbook, pp. 9, (5th Ed, 1998). Samples were further grouped based on the expression patterns of the known breast cancer associated genes Her2 and ERα (10 HER2 up, 26 HBER2 not up, 20 ER up and 16 ER not up) and for the Multi-Cancer Array Chip, a subset of 20 of these samples (9 stage I cancers, 8 stage II cancers, 3 stage III cancers) were assessed.

[0470] The results for the statistically significant up-regulated genes on the Breast Array Chip are shown in Tables 4 and 5. The results for the statistically significant up-regulated genes on the Multi-Cancer Array Chip are shown in Table 6. The first two columns of each table contain information about the sequence itself (Seq ID, Oligo Name), the next columns show the results obtained for all (“ALL”) breast cancer samples, cancers corresponding to stagei (“ST1”), stages II and III (“ST2,3”), grades 1 and 2 (“GR1,2”), grade 3 (“GR3”), cancers exhibiting up-regulation of Her2 (“HER2up”) or ERα (“ERup”) or those not exhibiting up-regulation of Her2 (“NOT BER2up”) or ERα (“NOT ERup”). ‘% up’ indicates the percentage of all experiments in which up-regulation of at least 2-fold was observed (n=36 for Colon Array Chip, n=20 for the Multi-Cancer Array Chip), ‘% valid up’ indicates the percentage of experiments with valid expression values in which up-regulation of at least 2-fold was observed.

TABLE 4

| | | | Mam | | Mam | | Mam | | Mam | | Mam |
|---|---|---|---|---|---|---|---|---|---|---|---|
| | | Mam | ALL % | Mam | ST1 % | Mam | ST2, 3 % | Mam | GR1, 2 % | Mam | GR3 % |
| | | ALL | valid | ST1 | valid | ST2, | valid | GR1, 2 | valid | GR3 | valid |
| | Oligo | % up | up | % up | up | 3 % up | up | % up | up | % up | up |
| DEX ID | Name | n = 36 | n = 36 | n = 9 | n = 9 | n = 27 | n = 27 | n = 10 | n = 10 | n = 26 | n = 26 |
| DEX0450_010.nt.1 | 17829.0 | 5.6 | 5.7 | 11.1 | 11.1 | 3.7 | 3.8 | 0.0 | 0.0 | 7.7 | 8.0 |
| DEX0450_010.nt.1 | 22376.0 | 8.3 | 8.6 | 11.1 | 12.5 | 7.4 | 7.4 | 0.0 | 0.0 | 11.5 | 12.0 |
| DEX0450_010.nt.3 | 17829.0 | 5.6 | 5.7 | 11.1 | 11.1 | 3.7 | 3.8 | 0.0 | 0.0 | 7.7 | 8.0 |
| DEX0450_010.nt.3 | 22376.0 | 8.3 | 8.6 | 11.1 | 12.5 | 7.4 | 7.4 | 0.0 | 0.0 | 11.5 | 12.0 |
| DEX0450_023.nt.1 | 22060.0 | 8.3 | 8.3 | 0.0 | 0.0 | 11.1 | 11.1 | 10.0 | 10.0 | 7.7 | 7.7 |
| DEX0450_031.nt.1 | 17869.0 | 8.3 | 8.3 | 11.1 | 11.1 | 7.4 | 7.4 | 0.0 | 0.0 | 11.5 | 11.5 |
| DEX0450_031.nt.1 | 31466.0 | 8.3 | 8.3 | 0.0 | 0.0 | 11.1 | 11.1 | 0.0 | 0.0 | 11.5 | 11.5 |
| DEX0450_032.nt.1 | 15848.0 | 0.0 | 0.0 | 0.0 | 0.0 | 0.0 | 0.0 | 0.0 | 0.0 | 0.0 | 0.0 |
| DEX0450_032.nt.1 | 16908.0 | 0.0 | 0.0 | 0.0 | 0.0 | 0.0 | 0.0 | 0.0 | 0.0 | 0.0 | 0.0 |
| DEX0450_032.nt.1 | 16912.0 | 0.0 | 0.0 | 0.0 | 0.0 | 0.0 | 0.0 | 0.0 | 0.0 | 0.0 | 0.0 |
| DEX0450_032.nt.1 | 19576.0 | 0.0 | 0.0 | 0.0 | 0.0 | 0.0 | 0.0 | 0.0 | 0.0 | 0.0 | 0.0 |
| DEX0450_032.nt.2 | 15315.0 | 0.0 | 0.0 | 0.0 | 0.0 | 0.0 | 0.0 | 0.0 | 0.0 | 0.0 | 0.0 |
| DEX0450_032.nt.2 | 15317.0 | 0.0 | 0.0 | 0.0 | 0.0 | 0.0 | 0.0 | 0.0 | 0.0 | 0.0 | 0.0 |
| DEX0450_032.nt.2 | 15320.0 | 0.0 | 0.0 | 0.0 | 0.0 | 0.0 | 0.0 | 0.0 | 0.0 | 0.0 | 0.0 |
| DEX0450_032.nt.2 | 15324.0 | 0.0 | 0.0 | 0.0 | 0.0 | 0.0 | 0.0 | 0.0 | 0.0 | 0.0 | 0.0 |
| DEX0450_032.nt.2 | 15829.0 | 0.0 | 0.0 | 0.0 | 0.0 | 0.0 | 0.0 | 0.0 | 0.0 | 0.0 | 0.0 |
| DEX0450_032.nt.2 | 15830.0 | 0.0 | 0.0 | 0.0 | 0.0 | 0.0 | 0.0 | 0.0 | 0.0 | 0.0 | 0.0 |
| DEX0450_032.nt.2 | 15848.0 | 0.0 | 0.0 | 0.0 | 0.0 | 0.0 | 0.0 | 0.0 | 0.0 | 0.0 | 0.0 |
| DEX0450_032.nt.2 | 15865.0 | 0.0 | 0.0 | 0.0 | 0.0 | 0.0 | 0.0 | 0.0 | 0.0 | 0.0 | 0.0 |
| DEX0450_032.nt.2 | 16111.0 | 0.0 | 0.0 | 0.0 | 0.0 | 0.0 | 0.0 | 0.0 | 0.0 | 0.0 | 0.0 |
| DEX0450_032.nt.2 | 16906.0 | 0.0 | 0.0 | 0.0 | 0.0 | 0.0 | 0.0 | 0.0 | 0.0 | 0.0 | 0.0 |
| DEX0450_032.nt.2 | 16908.0 | 0.0 | 0.0 | 0.0 | 0.0 | 0.0 | 0.0 | 0.0 | 0.0 | 0.0 | 0.0 |
| DEX0450_032.nt.2 | 16910.0 | 0.0 | 0.0 | 0.0 | 0.0 | 0.0 | 0.0 | 0.0 | 0.0 | 0.0 | 0.0 |
| DEX0450_032.nt.2 | 16912.0 | 0.0 | 0.0 | 0.0 | 0.0 | 0.0 | 0.0 | 0.0 | 0.0 | 0.0 | 0.0 |
| DEX0450_032.nt.2 | 19576.0 | 0.0 | 0.0 | 0.0 | 0.0 | 0.0 | 0.0 | 0.0 | 0.0 | 0.0 | 0.0 |
| DEX0450_032.nt.2 | 20237.0 | 0.0 | 0.0 | 0.0 | 0.0 | 0.0 | 0.0 | 0.0 | 0.0 | 0.0 | 0.0 |
| DEX0450_032.nt.2 | 31590.0 | 0.0 | 0.0 | 0.0 | 0.0 | 0.0 | 0.0 | 0.0 | 0.0 | 0.0 | 0.0 |
| DEX0450_032.nt.2 | 31591.0 | 0.0 | 0.0 | 0.0 | 0.0 | 0.0 | 0.0 | 0.0 | 0.0 | 0.0 | 0.0 |
| DEX0450_032.nt.3 | 15315.0 | 0.0 | 0.0 | 0.0 | 0.0 | 0.0 | 0.0 | 0.0 | 0.0 | 0.0 | 0.0 |
| DEX0450_032.nt.3 | 15317.0 | 0.0 | 0.0 | 0.0 | 0.0 | 0.0 | 0.0 | 0.0 | 0.0 | 0.0 | 0.0 |
| DEX0450_032.nt.3 | 15320.0 | 0.0 | 0.0 | 0.0 | 0.0 | 0.0 | 0.0 | 0.0 | 0.0 | 0.0 | 0.0 |
| DEX0450_032.nt.3 | 15324.0 | 0.0 | 0.0 | 0.0 | 0.0 | 0.0 | 0.0 | 0.0 | 0.0 | 0.0 | 0.0 |
| DEX0450_032.nt.3 | 15829.0 | 0.0 | 0.0 | 0.0 | 0.0 | 0.0 | 0.0 | 0.0 | 0.0 | 0.0 | 0.0 |
| DEX0450_032.nt.3 | 15830.0 | 0.0 | 0.0 | 0.0 | 0.0 | 0.0 | 0.0 | 0.0 | 0.0 | 0.0 | 0.0 |
| DEX0450_032.nt.3 | 15848.0 | 0.0 | 0.0 | 0.0 | 0.0 | 0.0 | 0.0 | 0.0 | 0.0 | 0.0 | 0.0 |
| DEX0450_032.nt.3 | 15865.0 | 0.0 | 0.0 | 0.0 | 0.0 | 0.0 | 0.0 | 0.0 | 0.0 | 0.0 | 0.0 |
| DEX0450_032.nt.3 | 16111.0 | 0.0 | 0.0 | 0.0 | 0.0 | 0.0 | 0.0 | 0.0 | 0.0 | 0.0 | 0.0 |
| DEX0450_032.nt.3 | 16906.0 | 0.0 | 0.0 | 0.0 | 0.0 | 0.0 | 0.0 | 0.0 | 0.0 | 0.0 | 0.0 |
| DEX0450_032.nt.3 | 16908.0 | 0.0 | 0.0 | 0.0 | 0.0 | 0.0 | 0.0 | 0.0 | 0.0 | 0.0 | 0.0 |
| DEX0450_032.nt.3 | 16910.0 | 0.0 | 0.0 | 0.0 | 0.0 | 0.0 | 0.0 | 0.0 | 0.0 | 0.0 | 0.0 |
| DEX0450_032.nt.3 | 16912.0 | 0.0 | 0.0 | 0.0 | 0.0 | 0.0 | 0.0 | 0.0 | 0.0 | 0.0 | 0.0 |
| DEX0450_032.nt.3 | 19576.0 | 0.0 | 0.0 | 0.0 | 0.0 | 0.0 | 0.0 | 0.0 | 0.0 | 0.0 | 0.0 |
| DEX0450_032.nt.3 | 20237.0 | 0.0 | 0.0 | 0.0 | 0.0 | 0.0 | 0.0 | 0.0 | 0.0 | 0.0 | 0.0 |
| DEX0450_032.nt.3 | 31590.0 | 0.0 | 0.0 | 0.0 | 0.0 | 0.0 | 0.0 | 0.0 | 0.0 | 0.0 | 0.0 |
| DEX0450_032.nt.3 | 31591.0 | 0.0 | 0.0 | 0.0 | 0.0 | 0.0 | 0.0 | 0.0 | 0.0 | 0.0 | 0.0 |
| DEX0450_032.nt.4 | 15315.0 | 0.0 | 0.0 | 0.0 | 0.0 | 0.0 | 0.0 | 0.0 | 0.0 | 0.0 | 0.0 |
| DEX0450_032.nt.4 | 15317.0 | 0.0 | 0.0 | 0.0 | 0.0 | 0.0 | 0.0 | 0.0 | 0.0 | 0.0 | 0.0 |
| DEX0450_032.nt.4 | 15320.0 | 0.0 | 0.0 | 0.0 | 0.0 | 0.0 | 0.0 | 0.0 | 0.0 | 0.0 | 0.0 |
| DEX0450_032.nt.4 | 15324.0 | 0.0 | 0.0 | 0.0 | 0.0 | 0.0 | 0.0 | 0.0 | 0.0 | 0.0 | 0.0 |
| DEX0450_032.nt.4 | 15829.0 | 0.0 | 0.0 | 0.0 | 0.0 | 0.0 | 0.0 | 0.0 | 0.0 | 0.0 | 0.0 |
| DEX0450_032.nt.4 | 15830.0 | 0.0 | 0.0 | 0.0 | 0.0 | 0.0 | 0.0 | 0.0 | 0.0 | 0.0 | 0.0 |
| DEX0450_032.nt.4 | 15848.0 | 0.0 | 0.0 | 0.0 | 0.0 | 0.0 | 0.0 | 0.0 | 0.0 | 0.0 | 0.0 |
| DEX0450_032.nt.4 | 15865.0 | 0.0 | 0.0 | 0.0 | 0.0 | 0.0 | 0.0 | 0.0 | 0.0 | 0.0 | 0.0 |
| DEX0450_032.nt.4 | 16111.0 | 0.0 | 0.0 | 0.0 | 0.0 | 0.0 | 0.0 | 0.0 | 0.0 | 0.0 | 0.0 |
| DEX0450_032.nt.4 | 16906.0 | 0.0 | 0.0 | 0.0 | 0.0 | 0.0 | 0.0 | 0.0 | 0.0 | 0.0 | 0.0 |
| DEX0450_032.nt.4 | 16908.0 | 0.0 | 0.0 | 0.0 | 0.0 | 0.0 | 0.0 | 0.0 | 0.0 | 0.0 | 0.0 |
| DEX0450_032.nt.4 | 16910.0 | 0.0 | 0.0 | 0.0 | 0.0 | 0.0 | 0.0 | 0.0 | 0.0 | 0.0 | 0.0 |
| DEX0450_032.nt.4 | 16912.0 | 0.0 | 0.0 | 0.0 | 0.0 | 0.0 | 0.0 | 0.0 | 0.0 | 0.0 | 0.0 |
| DEX0450_032.nt.4 | 19576.0 | 0.0 | 0.0 | 0.0 | 0.0 | 0.0 | 0.0 | 0.0 | 0.0 | 0.0 | 0.0 |
| DEX0450_032.nt.4 | 20237.0 | 0.0 | 0.0 | 0.0 | 0.0 | 0.0 | 0.0 | 0.0 | 0.0 | 0.0 | 0.0 |
| DEX0450_032.nt.4 | 31590.0 | 0.0 | 0.0 | 0.0 | 0.0 | 0.0 | 0.0 | 0.0 | 0.0 | 0.0 | 0.0 |
| DEX0450_032.nt.4 | 31591.0 | 0.0 | 0.0 | 0.0 | 0.0 | 0.0 | 0.0 | 0.0 | 0.0 | 0.0 | 0.0 |
| DEX0450_032.nt.5 | 15315.0 | 0.0 | 0.0 | 0.0 | 0.0 | 0.0 | 0.0 | 0.0 | 0.0 | 0.0 | 0.0 |
| DEX0450_032.nt.5 | 15317.0 | 0.0 | 0.0 | 0.0 | 0.0 | 0.0 | 0.0 | 0.0 | 0.0 | 0.0 | 0.0 |
| DEX0450_032.nt.5 | 15320.0 | 0.0 | 0.0 | 0.0 | 0.0 | 0.0 | 0.0 | 0.0 | 0.0 | 0.0 | 0.0 |
| DEX0450_032.nt.5 | 15324.0 | 0.0 | 0.0 | 0.0 | 0.0 | 0.0 | 0.0 | 0.0 | 0.0 | 0.0 | 0.0 |
| DEX0450_032.nt.5 | 15829.0 | 0.0 | 0.0 | 0.0 | 0.0 | 0.0 | 0.0 | 0.0 | 0.0 | 0.0 | 0.0 |
| DEX0450_032.nt.5 | 15830.0 | 0.0 | 0.0 | 0.0 | 0.0 | 0.0 | 0.0 | 0.0 | 0.0 | 0.0 | 0.0 |
| DEX0450_032.nt.5 | 15848.0 | 0.0 | 0.0 | 0.0 | 0.0 | 0.0 | 0.0 | 0.0 | 0.0 | 0.0 | 0.0 |
| DEX0450_032.nt.5 | 15865.0 | 0.0 | 0.0 | 0.0 | 0.0 | 0.0 | 0.0 | 0.0 | 0.0 | 0.0 | 0.0 |
| DEX0450_032.nt.5 | 16111.0 | 0.0 | 0.0 | 0.0 | 0.0 | 0.0 | 0.0 | 0.0 | 0.0 | 0.0 | 0.0 |
| DEX0450_032.nt.5 | 16906.0 | 0.0 | 0.0 | 0.0 | 0.0 | 0.0 | 0.0 | 0.0 | 0.0 | 0.0 | 0.0 |
| DEX0450_032.nt.5 | 16908.0 | 0.0 | 0.0 | 0.0 | 0.0 | 0.0 | 0.0 | 0.0 | 0.0 | 0.0 | 0.0 |
| DEX0450_032.nt.5 | 16910.0 | 0.0 | 0.0 | 0.0 | 0.0 | 0.0 | 0.0 | 0.0 | 0.0 | 0.0 | 0.0 |
| DEX0450_032.nt.5 | 16912.0 | 0.0 | 0.0 | 0.0 | 0.0 | 0.0 | 0.0 | 0.0 | 0.0 | 0.0 | 0.0 |
| DEX0450_032.nt.5 | 19576.0 | 0.0 | 0.0 | 0.0 | 0.0 | 0.0 | 0.0 | 0.0 | 0.0 | 0.0 | 0.0 |
| DEX0450_032.nt.5 | 20237.0 | 0.0 | 0.0 | 0.0 | 0.0 | 0.0 | 0.0 | 0.0 | 0.0 | 0.0 | 0.0 |
| DEX0450_032.nt.5 | 31590.0 | 0.0 | 0.0 | 0.0 | 0.0 | 0.0 | 0.0 | 0.0 | 0.0 | 0.0 | 0.0 |
| DEX0450_032.nt.5 | 31591.0 | 0.0 | 0.0 | 0.0 | 0.0 | 0.0 | 0.0 | 0.0 | 0.0 | 0.0 | 0.0 |
| DEX0450_032.nt.6 | 15315.0 | 0.0 | 0.0 | 0.0 | 0.0 | 0.0 | 0.0 | 0.0 | 0.0 | 0.0 | 0.0 |
| DEX0450_032.nt.6 | 15320.0 | 0.0 | 0.0 | 0.0 | 0.0 | 0.0 | 0.0 | 0.0 | 0.0 | 0.0 | 0.0 |
| DEX0450_032.nt.6 | 15324.0 | 0.0 | 0.0 | 0.0 | 0.0 | 0.0 | 0.0 | 0.0 | 0.0 | 0.0 | 0.0 |
| DEX0450_032.nt.6 | 15829.0 | 0.0 | 0.0 | 0.0 | 0.0 | 0.0 | 0.0 | 0.0 | 0.0 | 0.0 | 0.0 |
| DEX0450_032.nt.6 | 15830.0 | 0.0 | 0.0 | 0.0 | 0.0 | 0.0 | 0.0 | 0.0 | 0.0 | 0.0 | 0.0 |
| DEX0450_032.nt.6 | 15848.0 | 0.0 | 0.0 | 0.0 | 0.0 | 0.0 | 0.0 | 0.0 | 0.0 | 0.0 | 0.0 |
| DEX0450_032.nt.6 | 15865.0 | 0.0 | 0.0 | 0.0 | 0.0 | 0.0 | 0.0 | 0.0 | 0.0 | 0.0 | 0.0 |
| DEX0450_032.nt.6 | 16111.0 | 0.0 | 0.0 | 0.0 | 0.0 | 0.0 | 0.0 | 0.0 | 0.0 | 0.0 | 0.0 |
| DEX0450_032.nt.6 | 16906.0 | 0.0 | 0.0 | 0.0 | 0.0 | 0.0 | 0.0 | 0.0 | 0.0 | 0.0 | 0.0 |
| DEX0450_032.nt.6 | 16908.0 | 0.0 | 0.0 | 0.0 | 0.0 | 0.0 | 0.0 | 0.0 | 0.0 | 0.0 | 0.0 |
| DEX0450_032.nt.6 | 16910.0 | 0.0 | 0.0 | 0.0 | 0.0 | 0.0 | 0.0 | 0.0 | 0.0 | 0.0 | 0.0 |
| DEX0450_032.nt.6 | 16912.0 | 0.0 | 0.0 | 0.0 | 0.0 | 0.0 | 0.0 | 0.0 | 0.0 | 0.0 | 0.0 |
| DEX0450_032.nt.6 | 19576.0 | 0.0 | 0.0 | 0.0 | 0.0 | 0.0 | 0.0 | 0.0 | 0.0 | 0.0 | 0.0 |
| DEX0450_032.nt.6 | 20237.0 | 0.0 | 0.0 | 0.0 | 0.0 | 0.0 | 0.0 | 0.0 | 0.0 | 0.0 | 0.0 |
| DEX0450_032.nt.6 | 31590.0 | 0.0 | 0.0 | 0.0 | 0.0 | 0.0 | 0.0 | 0.0 | 0.0 | 0.0 | 0.0 |
| DEX0450_032.nt.6 | 31591.0 | 0.0 | 0.0 | 0.0 | 0.0 | 0.0 | 0.0 | 0.0 | 0.0 | 0.0 | 0.0 |
| DEX0450_032.nt.7 | 15315.0 | 0.0 | 0.0 | 0.0 | 0.0 | 0.0 | 0.0 | 0.0 | 0.0 | 0.0 | 0.0 |
| DEX0450_032.nt.7 | 15317.0 | 0.0 | 0.0 | 0.0 | 0.0 | 0.0 | 0.0 | 0.0 | 0.0 | 0.0 | 0.0 |
| DEX0450_032.nt.7 | 15320.0 | 0.0 | 0.0 | 0.0 | 0.0 | 0.0 | 0.0 | 0.0 | 0.0 | 0.0 | 0.0 |
| DEX0450_032.nt.7 | 15324.0 | 0.0 | 0.0 | 0.0 | 0.0 | 0.0 | 0.0 | 0.0 | 0.0 | 0.0 | 0.0 |
| DEX0450_032.nt.7 | 15848.0 | 0.0 | 0.0 | 0.0 | 0.0 | 0.0 | 0.0 | 0.0 | 0.0 | 0.0 | 0.0 |
| DEX0450_032.nt.7 | 15865.0 | 0.0 | 0.0 | 0.0 | 0.0 | 0.0 | 0.0 | 0.0 | 0.0 | 0.0 | 0.0 |
| DEX0450_032.nt.7 | 16906.0 | 0.0 | 0.0 | 0.0 | 0.0 | 0.0 | 0.0 | 0.0 | 0.0 | 0.0 | 0.0 |
| DEX0450_032.nt.7 | 16908.0 | 0.0 | 0.0 | 0.0 | 0.0 | 0.0 | 0.0 | 0.0 | 0.0 | 0.0 | 0.0 |
| DEX0450_032.nt.7 | 16912.0 | 0.0 | 0.0 | 0.0 | 0.0 | 0.0 | 0.0 | 0.0 | 0.0 | 0.0 | 0.0 |
| DEX0450_032.nt.7 | 19576.0 | 0.0 | 0.0 | 0.0 | 0.0 | 0.0 | 0.0 | 0.0 | 0.0 | 0.0 | 0.0 |
| DEX0450_032.nt.7 | 20237.0 | 0.0 | 0.0 | 0.0 | 0.0 | 0.0 | 0.0 | 0.0 | 0.0 | 0.0 | 0.0 |
| DEX0450_032.nt.7 | 31590.0 | 0.0 | 0.0 | 0.0 | 0.0 | 0.0 | 0.0 | 0.0 | 0.0 | 0.0 | 0.0 |
| DEX0450_032.nt.7 | 31591.0 | 0.0 | 0.0 | 0.0 | 0.0 | 0.0 | 0.0 | 0.0 | 0.0 | 0.0 | 0.0 |
| DEX0450_044.nt.1 | 24210.0 | 2.8 | 2.8 | 11.1 | 11.1 | 0.0 | 0.0 | 0.0 | 0.0 | 3.8 | 3.8 |
| DEX0450_044.nt.1 | 24211.0 | 5.6 | 5.6 | 11.1 | 11.1 | 3.7 | 3.7 | 0.0 | 0.0 | 7.7 | 7.7 |
| DEX0450_044.nt.2 | 24210.0 | 2.8 | 2.8 | 11.1 | 11.1 | 0.0 | 0.0 | 0.0 | 0.0 | 3.8 | 3.8 |
| DEX0450_044.nt.2 | 24211.0 | 5.6 | 5.6 | 11.1 | 11.1 | 3.7 | 3.7 | 0.0 | 0.0 | 7.7 | 7.7 |
| DEX0450_044.nt.3 | 24210.0 | 2.8 | 2.8 | 11.1 | 11.1 | 0.0 | 0.0 | 0.0 | 0.0 | 3.8 | 3.8 |
| DEX0450_044.nt.3 | 24211.0 | 5.6 | 5.6 | 11.1 | 11.1 | 3.7 | 3.7 | 0.0 | 0.0 | 7.7 | 7.7 |
| DEX0450_045.nt.1 | 19853.0 | 5.6 | 5.6 | 0.0 | 0.0 | 7.4 | 7.4 | 0.0 | 0.0 | 7.7 | 7.7 |
| DEX0450_045.nt.1 | 19854.0 | 2.8 | 2.8 | 0.0 | 0.0 | 3.7 | 3.7 | 0.0 | 0.0 | 3.8 | 3.8 |
| DEX0450_053.nt.1 | 31644.0 | 19.4 | 19.4 | 22.2 | 22.2 | 18.5 | 18.5 | 20.0 | 20.0 | 19.2 | 19.2 |
| DEX0450_053.nt.1 | 31645.0 | 19.4 | 19.4 | 22.2 | 22.2 | 18.5 | 18.5 | 20.0 | 20.0 | 19.2 | 19.2 |

[0471] TABLE 5

| | | | | | Mam | | | | Mam |
|---|---|---|---|---|---|---|---|---|---|
| | | | Mam | Mam | NOT | | Mam | Mam | NOT |
| | | Mam | HER2up | NOT | HER2up | Mam | ERup | NOT | ERup |
| | | HER2up | % valid | HER2up | % valid | ERup | % valid | ERup | % valid |
| | Oligo | % up | up | % up | up | % up | up | % up | up |
| DEX ID | Name | n = 10 | n = 10 | n = 26 | n = 26 | n = 20 | n = 20 | n = 16 | n = 10 |
| DEX0450_010.nt.1 | 17829.0 | 0.0 | 0.0 | 7.7 | 8.0 | 0.0 | 0.0 | 12.5 | 13.3 |
| DEX0450_010.nt.1 | 22376.0 | 0.0 | 0.0 | 11.5 | 12.0 | 0.0 | 0.0 | 18.8 | 20.0 |
| DEX0450_010.nt.3 | 17829.0 | 0.0 | 0.0 | 7.7 | 8.0 | 0.0 | 0.0 | 12.5 | 13.3 |
| DEX0450_010.nt.3 | 22376.0 | 0.0 | 0.0 | 11.5 | 12.0 | 0.0 | 0.0 | 18.8 | 20.0 |
| DEX0450_023.nt.1 | 22060.0 | 20.0 | 20.0 | 3.8 | 3.8 | 5.0 | 5.0 | 12.5 | 12.5 |
| DEX0450_031.nt.1 | 17869.0 | 0.0 | 0.0 | 11.5 | 11.5 | 0.0 | 0.0 | 18.8 | 18.8 |
| DEX0450_031.nt.1 | 31466.0 | 0.0 | 0.0 | 11.5 | 11.5 | 0.0 | 0.0 | 18.8 | 18.8 |
| DEX0450_032.nt.1 | 15848.0 | 0.0 | 0.0 | 0.0 | 0.0 | 0.0 | 0.0 | 0.0 | 0.0 |
| DEX0450_032.nt.1 | 16908.0 | 0.0 | 0.0 | 0.0 | 0.0 | 0.0 | 0.0 | 0.0 | 0.0 |
| DEX0450_032.nt.1 | 16912.0 | 0.0 | 0.0 | 0.0 | 0.0 | 0.0 | 0.0 | 0.0 | 0.0 |
| DEX0450_032.nt.1 | 19576.0 | 0.0 | 0.0 | 0.0 | 0.0 | 0.0 | 0.0 | 0.0 | 0.0 |
| DEX0450_032.nt.2 | 15315.0 | 0.0 | 0.0 | 0.0 | 0.0 | 0.0 | 0.0 | 0.0 | 0.0 |
| DEX0450_032.nt.2 | 15317.0 | 0.0 | 0.0 | 0.0 | 0.0 | 0.0 | 0.0 | 0.0 | 0.0 |
| DEX0450_032.nt.2 | 15320.0 | 0.0 | 0.0 | 0.0 | 0.0 | 0.0 | 0.0 | 0.0 | 0.0 |
| DEX0450_032.nt.2 | 15324.0 | 0.0 | 0.0 | 0.0 | 0.0 | 0.0 | 0.0 | 0.0 | 0.0 |
| DEX0450_032.nt.2 | 15829.0 | 0.0 | 0.0 | 0.0 | 0.0 | 0.0 | 0.0 | 0.0 | 0.0 |
| DEX0450_032.nt.2 | 15830.0 | 0.0 | 0.0 | 0.0 | 0.0 | 0.0 | 0.0 | 0.0 | 0.0 |
| DEX0450_032.nt.2 | 15848.0 | 0.0 | 0.0 | 0.0 | 0.0 | 0.0 | 0.0 | 0.0 | 0.0 |
| DEX0450_032.nt.2 | 15865.0 | 0.0 | 0.0 | 0.0 | 0.0 | 0.0 | 0.0 | 0.0 | 0.0 |
| DEX0450_032.nt.2 | 16111.0 | 0.0 | 0.0 | 0.0 | 0.0 | 0.0 | 0.0 | 0.0 | 0.0 |
| DEX0450_032.nt.2 | 16906.0 | 0.0 | 0.0 | 0.0 | 0.0 | 0.0 | 0.0 | 0.0 | 0.0 |
| DEX0450_032.nt.2 | 16908.0 | 0.0 | 0.0 | 0.0 | 0.0 | 0.0 | 0.0 | 0.0 | 0.0 |
| DEX0450_032.nt.2 | 16910.0 | 0.0 | 0.0 | 0.0 | 0.0 | 0.0 | 0.0 | 0.0 | 0.0 |
| DEX0450_032.nt.2 | 16912.0 | 0.0 | 0.0 | 0.0 | 0.0 | 0.0 | 0.0 | 0.0 | 0.0 |
| DEX0450_032.nt.2 | 19576.0 | 0.0 | 0.0 | 0.0 | 0.0 | 0.0 | 0.0 | 0.0 | 0.0 |
| DEX0450_032.nt.2 | 20237.0 | 0.0 | 0.0 | 0.0 | 0.0 | 0.0 | 0.0 | 0.0 | 0.0 |
| DEX0450_032.nt.2 | 31590.0 | 0.0 | 0.0 | 0.0 | 0.0 | 0.0 | 0.0 | 0.0 | 0.0 |
| DEX0450_032.nt.2 | 31591.0 | 0.0 | 0.0 | 0.0 | 0.0 | 0.0 | 0.0 | 0.0 | 0.0 |
| DEX0450_032.nt.3 | 15315.0 | 0.0 | 0.0 | 0.0 | 0.0 | 0.0 | 0.0 | 0.0 | 0.0 |
| DEX0450_032.nt.3 | 15317.0 | 0.0 | 0.0 | 0.0 | 0.0 | 0.0 | 0.0 | 0.0 | 0.0 |
| DEX0450_032.nt.3 | 15320.0 | 0.0 | 0.0 | 0.0 | 0.0 | 0.0 | 0.0 | 0.0 | 0.0 |
| DEX0450_032.nt.3 | 15324.0 | 0.0 | 0.0 | 0.0 | 0.0 | 0.0 | 0.0 | 0.0 | 0.0 |
| DEX0450_032.nt.3 | 15829.0 | 0.0 | 0.0 | 0.0 | 0.0 | 0.0 | 0.0 | 0.0 | 0.0 |
| DEX0450_032.nt.3 | 15830.0 | 0.0 | 0.0 | 0.0 | 0.0 | 0.0 | 0.0 | 0.0 | 0.0 |
| DEX0450_032.nt.3 | 15848.0 | 0.0 | 0.0 | 0.0 | 0.0 | 0.0 | 0.0 | 0.0 | 0.0 |
| DEX0450_032.nt.3 | 15865.0 | 0.0 | 0.0 | 0.0 | 0.0 | 0.0 | 0.0 | 0.0 | 0.0 |
| DEX0450_032.nt.3 | 16111.0 | 0.0 | 0.0 | 0.0 | 0.0 | 0.0 | 0.0 | 0.0 | 0.0 |
| DEX0450_032.nt.3 | 16906.0 | 0.0 | 0.0 | 0.0 | 0.0 | 0.0 | 0.0 | 0.0 | 0.0 |
| DEX0450_032.nt.3 | 16908.0 | 0.0 | 0.0 | 0.0 | 0.0 | 0.0 | 0.0 | 0.0 | 0.0 |
| DEX0450_032.nt.3 | 16910.0 | 0.0 | 0.0 | 0.0 | 0.0 | 0.0 | 0.0 | 0.0 | 0.0 |
| DEX0450_032.nt.3 | 16912.0 | 0.0 | 0.0 | 0.0 | 0.0 | 0.0 | 0.0 | 0.0 | 0.0 |
| DEX0450_032.nt.3 | 19576.0 | 0.0 | 0.0 | 0.0 | 0.0 | 0.0 | 0.0 | 0.0 | 0.0 |
| DEX0450_032.nt.3 | 20237.0 | 0.0 | 0.0 | 0.0 | 0.0 | 0.0 | 0.0 | 0.0 | 0.0 |
| DEX0450_032.nt.3 | 31590.0 | 0.0 | 0.0 | 0.0 | 0.0 | 0.0 | 0.0 | 0.0 | 0.0 |
| DEX0450_032.nt.3 | 31591.0 | 0.0 | 0.0 | 0.0 | 0.0 | 0.0 | 0.0 | 0.0 | 0.0 |
| DEX0450_032.nt.4 | 15315.0 | 0.0 | 0.0 | 0.0 | 0.0 | 0.0 | 0.0 | 0.0 | 0.0 |
| DEX0450_032.nt.4 | 15317.0 | 0.0 | 0.0 | 0.0 | 0.0 | 0.0 | 0.0 | 0.0 | 0.0 |
| DEX0450_032.nt.4 | 15320.0 | 0.0 | 0.0 | 0.0 | 0.0 | 0.0 | 0.0 | 0.0 | 0.0 |
| DEX0450_032.nt.4 | 15324.0 | 0.0 | 0.0 | 0.0 | 0.0 | 0.0 | 0.0 | 0.0 | 0.0 |
| DEX0450_032.nt.4 | 15829.0 | 0.0 | 0.0 | 0.0 | 0.0 | 0.0 | 0.0 | 0.0 | 0.0 |
| DEX0450_032.nt.4 | 15830.0 | 0.0 | 0.0 | 0.0 | 0.0 | 0.0 | 0.0 | 0.0 | 0.0 |
| DEX0450_032.nt.4 | 15848.0 | 0.0 | 0.0 | 0.0 | 0.0 | 0.0 | 0.0 | 0.0 | 0.0 |
| DEX0450_032.nt.4 | 15865.0 | 0.0 | 0.0 | 0.0 | 0.0 | 0.0 | 0.0 | 0.0 | 0.0 |
| DEX0450_032.nt.4 | 16111.0 | 0.0 | 0.0 | 0.0 | 0.0 | 0.0 | 0.0 | 0.0 | 0.0 |
| DEX0450_032.nt.4 | 16906.0 | 0.0 | 0.0 | 0.0 | 0.0 | 0.0 | 0.0 | 0.0 | 0.0 |
| DEX0450_032.nt.4 | 16908.0 | 0.0 | 0.0 | 0.0 | 0.0 | 0.0 | 0.0 | 0.0 | 0.0 |
| DEX0450_032.nt.4 | 16910.0 | 0.0 | 0.0 | 0.0 | 0.0 | 0.0 | 0.0 | 0.0 | 0.0 |
| DEX0450_032.nt.4 | 16912.0 | 0.0 | 0.0 | 0.0 | 0.0 | 0.0 | 0.0 | 0.0 | 0.0 |
| DEX0450_032.nt.4 | 19576.0 | 0.0 | 0.0 | 0.0 | 0.0 | 0.0 | 0.0 | 0.0 | 0.0 |
| DEX0450_032.nt.4 | 20237.0 | 0.0 | 0.0 | 0.0 | 0.0 | 0.0 | 0.0 | 0.0 | 0.0 |
| DEX0450_032.nt.4 | 31590.0 | 0.0 | 0.0 | 0.0 | 0.0 | 0.0 | 0.0 | 0.0 | 0.0 |
| DEX0450_032.nt.4 | 31591.0 | 0.0 | 0.0 | 0.0 | 0.0 | 0.0 | 0.0 | 0.0 | 0.0 |
| DEX0450_032.nt.5 | 15315.0 | 0.0 | 0.0 | 0.0 | 0.0 | 0.0 | 0.0 | 0.0 | 0.0 |
| DEX0450_032.nt.5 | 15317.0 | 0.0 | 0.0 | 0.0 | 0.0 | 0.0 | 0.0 | 0.0 | 0.0 |
| DEX0450_032.nt.5 | 15320.0 | 0.0 | 0.0 | 0.0 | 0.0 | 0.0 | 0.0 | 0.0 | 0.0 |
| DEX0450_032.nt.5 | 15324.0 | 0.0 | 0.0 | 0.0 | 0.0 | 0.0 | 0.0 | 0.0 | 0.0 |
| DEX0450_032.nt.5 | 15829.0 | 0.0 | 0.0 | 0.0 | 0.0 | 0.0 | 0.0 | 0.0 | 0.0 |
| DEX0450_032.nt.5 | 15830.0 | 0.0 | 0.0 | 0.0 | 0.0 | 0.0 | 0.0 | 0.0 | 0.0 |
| DEX0450_032.nt.5 | 15848.0 | 0.0 | 0.0 | 0.0 | 0.0 | 0.0 | 0.0 | 0.0 | 0.0 |
| DEX0450_032.nt.5 | 15865.0 | 0.0 | 0.0 | 0.0 | 0.0 | 0.0 | 0.0 | 0.0 | 0.0 |
| DEX0450_032.nt.5 | 16111.0 | 0.0 | 0.0 | 0.0 | 0.0 | 0.0 | 0.0 | 0.0 | 0.0 |
| DEX0450_032.nt.5 | 16906.0 | 0.0 | 0.0 | 0.0 | 0.0 | 0.0 | 0.0 | 0.0 | 0.0 |
| DEX0450_032.nt.5 | 16908.0 | 0.0 | 0.0 | 0.0 | 0.0 | 0.0 | 0.0 | 0.0 | 0.0 |
| DEX0450_032.nt.5 | 16910.0 | 0.0 | 0.0 | 0.0 | 0.0 | 0.0 | 0.0 | 0.0 | 0.0 |
| DEX0450_032.nt.5 | 16912.0 | 0.0 | 0.0 | 0.0 | 0.0 | 0.0 | 0.0 | 0.0 | 0.0 |
| DEX0450_032.nt.5 | 19576.0 | 0.0 | 0.0 | 0.0 | 0.0 | 0.0 | 0.0 | 0.0 | 0.0 |
| DEX0450_032.nt.5 | 20237.0 | 0.0 | 0.0 | 0.0 | 0.0 | 0.0 | 0.0 | 0.0 | 0.0 |
| DEX0450_032.nt.5 | 31590.0 | 0.0 | 0.0 | 0.0 | 0.0 | 0.0 | 0.0 | 0.0 | 0.0 |
| DEX0450_032.nt.5 | 31591.0 | 0.0 | 0.0 | 0.0 | 0.0 | 0.0 | 0.0 | 0.0 | 0.0 |
| DEX0450_032.nt.6 | 15315.0 | 0.0 | 0.0 | 0.0 | 0.0 | 0.0 | 0.0 | 0.0 | 0.0 |
| DEX0450_032.nt.6 | 15320.0 | 0.0 | 0.0 | 0.0 | 0.0 | 0.0 | 0.0 | 0.0 | 0.0 |
| DEX0450_032.nt.6 | 15324.0 | 0.0 | 0.0 | 0.0 | 0.0 | 0.0 | 0.0 | 0.0 | 0.0 |
| DEX0450_032.nt.6 | 15829.0 | 0.0 | 0.0 | 0.0 | 0.0 | 0.0 | 0.0 | 0.0 | 0.0 |
| DEX0450_032.nt.6 | 15830.0 | 0.0 | 0.0 | 0.0 | 0.0 | 0.0 | 0.0 | 0.0 | 0.0 |
| DEX0450_032.nt.6 | 15848.0 | 0.0 | 0.0 | 0.0 | 0.0 | 0.0 | 0.0 | 0.0 | 0.0 |
| DEX0450_032.nt.6 | 15865.0 | 0.0 | 0.0 | 0.0 | 0.0 | 0.0 | 0.0 | 0.0 | 0.0 |
| DEX0450_032.nt.6 | 16111.0 | 0.0 | 0.0 | 0.0 | 0.0 | 0.0 | 0.0 | 0.0 | 0.0 |
| DEX0450_032.nt.6 | 16906.0 | 0.0 | 0.0 | 0.0 | 0.0 | 0.0 | 0.0 | 0.0 | 0.0 |
| DEX0450_032.nt.6 | 16908.0 | 0.0 | 0.0 | 0.0 | 0.0 | 0.0 | 0.0 | 0.0 | 0.0 |
| DEX0450_032.nt.6 | 16910.0 | 0.0 | 0.0 | 0.0 | 0.0 | 0.0 | 0.0 | 0.0 | 0.0 |
| DEX0450_032.nt.6 | 16912.0 | 0.0 | 0.0 | 0.0 | 0.0 | 0.0 | 0.0 | 0.0 | 0.0 |
| DEX0450_032.nt.6 | 19576.0 | 0.0 | 0.0 | 0.0 | 0.0 | 0.0 | 0.0 | 0.0 | 0.0 |
| DEX0450_032.nt.6 | 20237.0 | 0.0 | 0.0 | 0.0 | 0.0 | 0.0 | 0.0 | 0.0 | 0.0 |
| DEX0450_032.nt.6 | 31590.0 | 0.0 | 0.0 | 0.0 | 0.0 | 0.0 | 0.0 | 0.0 | 0.0 |
| DEX0450_032.nt.6 | 31591.0 | 0.0 | 0.0 | 0.0 | 0.0 | 0.0 | 0.0 | 0.0 | 0.0 |
| DEX0450_032.nt.7 | 15315.0 | 0.0 | 0.0 | 0.0 | 0.0 | 0.0 | 0.0 | 0.0 | 0.0 |
| DEX0450_032.nt.7 | 15317.0 | 0.0 | 0.0 | 0.0 | 0.0 | 0.0 | 0.0 | 0.0 | 0.0 |
| DEX0450_032.nt.7 | 15320.0 | 0.0 | 0.0 | 0.0 | 0.0 | 0.0 | 0.0 | 0.0 | 0.0 |
| DEX0450_032.nt.7 | 15324.0 | 0.0 | 0.0 | 0.0 | 0.0 | 0.0 | 0.0 | 0.0 | 0.0 |
| DEX0450_032.nt.7 | 15848.0 | 0.0 | 0.0 | 0.0 | 0.0 | 0.0 | 0.0 | 0.0 | 0.0 |
| DEX0450_032.nt.7 | 15865.0 | 0.0 | 0.0 | 0.0 | 0.0 | 0.0 | 0.0 | 0.0 | 0.0 |
| DEX0450_032.nt.7 | 16906.0 | 0.0 | 0.0 | 0.0 | 0.0 | 0.0 | 0.0 | 0.0 | 0.0 |
| DEX0450_032.nt.7 | 16908.0 | 0.0 | 0.0 | 0.0 | 0.0 | 0.0 | 0.0 | 0.0 | 0.0 |
| DEX0450_032.nt.7 | 16912.0 | 0.0 | 0.0 | 0.0 | 0.0 | 0.0 | 0.0 | 0.0 | 0.0 |
| DEX0450_032.nt.7 | 19576.0 | 0.0 | 0.0 | 0.0 | 0.0 | 0.0 | 0.0 | 0.0 | 0.0 |
| DEX0450_032.nt.7 | 20237.0 | 0.0 | 0.0 | 0.0 | 0.0 | 0.0 | 0.0 | 0.0 | 0.0 |
| DEX0450_032.nt.7 | 31590.0 | 0.0 | 0.0 | 0.0 | 0.0 | 0.0 | 0.0 | 0.0 | 0.0 |
| DEX0450_032.nt.7 | 31591.0 | 0.0 | 0.0 | 0.0 | 0.0 | 0.0 | 0.0 | 0.0 | 0.0 |
| DEX0450_044.nt.1 | 24210.0 | 0.0 | 0.0 | 3.8 | 3.8 | 0.0 | 0.0 | 6.2 | 6.2 |
| DEX0450_044.nt.1 | 24211.0 | 10.0 | 10.0 | 3.8 | 3.8 | 5.0 | 5.0 | 6.2 | 6.2 |
| DEX0450_044.nt.2 | 24210.0 | 0.0 | 0.0 | 3.8 | 3.8 | 0.0 | 0.0 | 6.2 | 6.2 |
| DEX0450_044.nt.2 | 24211.0 | 10.0 | 10.0 | 3.8 | 3.8 | 5.0 | 5.0 | 6.2 | 6.2 |
| DEX0450_044.nt.3 | 24210.0 | 0.0 | 0.0 | 3.8 | 3.8 | 0.0 | 0.0 | 6.2 | 6.2 |
| DEX0450_044.nt.3 | 24211.0 | 10.0 | 10.0 | 3.8 | 3.8 | 5.0 | 5.0 | 6.2 | 6.2 |
| DEX0450_045.nt.1 | 19853.0 | 0.0 | 0.0 | 7.7 | 7.7 | 0.0 | 0.0 | 12.5 | 12.5 |
| DEX0450_045.nt.1 | 19854.0 | 0.0 | 0.0 | 3.8 | 3.8 | 0.0 | 0.0 | 6.2 | 6.2 |
| DEX0450_053.nt.1 | 31644.0 | 0.0 | 0.0 | 26.9 | 26.9 | 15.0 | 15.0 | 25.0 | 25.0 |
| DEX0450_053.nt.1 | 31645.0 | 0.0 | 0.0 | 26.9 | 26.9 | 15.0 | 15.0 | 25.0 | 25.0 |

[0472] TABLE 6

| | | | Mam | | Mam | Mam | Mam |
|---|---|---|---|---|---|---|---|
| | | Mam | Multi- | Mam | Multi- | Multi- | Multi- |
| | | Multi- | Cancer | Multi- | Cancer | Cancer | Cancer |
| | | Cancer | ALL | Cancer | ST1 | ST2, 3 | ST2, 3 |
| | Oligo | ALL % up | % valid | ST1 % up | % valid | % up | % valid |
| DEX ID | Name | n = 20 | up n = 20 | n = 9 | up n = 9 | n = 11 | up n = 11 |
| DEX0450_025.nt.1 | 77759.0 | 15.0 | 15.0 | 11.1 | 11.1 | 18.2 | 18.2 |
| DEX0450_025.nt.1 | 77759.1 | 15.0 | 15.0 | 11.1 | 11.1 | 18.2 | 18.2 |
| DEX0450_031.nt.1 | 956.0 | 5.0 | 5.0 | 11.1 | 11.1 | 0.0 | 0.0 |

[0473] Lung Cancer Chips

[0474] For lung cancer two different chip designs were evaluated with overlapping sets of a total of 29 samples, comparing the expression patterns of lung cancer derived polyA+RNA to polyA+RNA isolated from a pool of 12 normal lung tissues. For the Lung Array Chip all 29 samples (15 squamous cell carcinomas and 14 adenocarcinomas including 14 stage I and 15 stage II/III cancers) were analyzed and for the Multi-Cancer Array Chip a subset of 22 of these samples (10 squamous cell carcinomas, 12 adenocarcinomas) were assessed.

[0475] The results for the statistically significant up-regulated genes on the Lung Array Chip are shown in Table 7. The results for the statistically significant up-regulated genes on the Multi-Cancer Array Chip are shown in Table 8. The first two columns of each table contain information about the sequence itself (DEX ID, Oligo Name), the next columns show the results obtained for all (“ALL”) lung cancer samples, squamous cell carcinomas (“SQ”), adenocarcinomas (“AD”), or cancers corresponding to stage I (“ST1”), or stages II and III (“ST2,3”). ‘% up’ indicates the percentage of all experiments in which up-regulation of at least 2-fold was observed (n=29 for Lung Array Chip, n=22 for Multi-Cancer Array Chip), ‘% valid up’ indicates the percentage of experiments with valid expression values in which up-regulation of at least 2-fold was observed.

TABLE 7

| | | | Lng | | Lng | | Lng | | Lng | | Lng |
|---|---|---|---|---|---|---|---|---|---|---|---|
| | | Lng | ALL % | Lng | SQ % | Lng | AD % | Lng | ST1 % | Lng | ST2, 3 % |
| | | ALL | valid | SQ | valid | AD | valid | ST1 | valid | ST2, 3 | valid |
| | Oligo | % up | up | % up | up | % up | up | % up | up | % up | up |
| DEX ID | Name | n = 29 | n = 29 | n = 15 | n = 15 | n = 14 | n = 14 | n = 14 | n = 14 | n = 15 | n = 15 |
| DEX0450_001.nt.1 | 2383.0 | 0.0 | 0.0 | 0.0 | 0.0 | 0.0 | 0.0 | 0.0 | 0.0 | 0.0 | 0.0 |
| DEX0450_001.nt.1 | 2400.0 | 0.0 | 0.0 | 0.0 | 0.0 | 0.0 | 0.0 | 0.0 | 0.0 | 0.0 | 0.0 |
| DEX0450_001.nt.1 | 2404.0 | 0.0 | 0.0 | 0.0 | 0.0 | 0.0 | 0.0 | 0.0 | 0.0 | 0.0 | 0.0 |
| DEX0450_001.nt.1 | 4831.0 | 0.0 | 0.0 | 0.0 | 0.0 | 0.0 | 0.0 | 0.0 | 0.0 | 0.0 | 0.0 |
| DEX0450_001.nt.1 | 4832.0 | 0.0 | 0.0 | 0.0 | 0.0 | 0.0 | 0.0 | 0.0 | 0.0 | 0.0 | 0.0 |
| DEX0450_031.nt.1 | 835.0 | 0.0 | 0.0 | 0.0 | 0.0 | 0.0 | 0.0 | 0.0 | 0.0 | 0.0 | 0.0 |
| DEX0450_031.nt.1 | 836.0 | 0.0 | 0.0 | 0.0 | 0.0 | 0.0 | 0.0 | 0.0 | 0.0 | 0.0 | 0.0 |
| DEX0450_031.nt.1 | 953.0 | 0.0 | 0.0 | 0.0 | 0.0 | 0.0 | 0.0 | 0.0 | 0.0 | 0.0 | 0.0 |
| DEX0450_031.nt.1 | 955.0 | 0.0 | 0.0 | 0.0 | 0.0 | 0.0 | 0.0 | 0.0 | 0.0 | 0.0 | 0.0 |
| DEX0450_031.nt.1 | 957.0 | 0.0 | 0.0 | 0.0 | 0.0 | 0.0 | 0.0 | 0.0 | 0.0 | 0.0 | 0.0 |
| DEX0450_031.nt.1 | 5254.0 | 0.0 | 0.0 | 0.0 | 0.0 | 0.0 | 0.0 | 0.0 | 0.0 | 0.0 | 0.0 |
| DEX0450_031.nt.1 | 5749.0 | 0.0 | 0.0 | 0.0 | 0.0 | 0.0 | 0.0 | 0.0 | 0.0 | 0.0 | 0.0 |
| DEX0450_031.nt.1 | 5750.0 | 0.0 | 0.0 | 0.0 | 0.0 | 0.0 | 0.0 | 0.0 | 0.0 | 0.0 | 0.0 |
| DEX0450_031.nt.2 | 957.0 | 0.0 | 0.0 | 0.0 | 0.0 | 0.0 | 0.0 | 0.0 | 0.0 | 0.0 | 0.0 |
| DEX0450_031.nt.2 | 5254.0 | 0.0 | 0.0 | 0.0 | 0.0 | 0.0 | 0.0 | 0.0 | 0.0 | 0.0 | 0.0 |
| DEX0450_031.nt.2 | 5749.0 | 0.0 | 0.0 | 0.0 | 0.0 | 0.0 | 0.0 | 0.0 | 0.0 | 0.0 | 0.0 |
| DEX0450_031.nt.2 | 5750.0 | 0.0 | 0.0 | 0.0 | 0.0 | 0.0 | 0.0 | 0.0 | 0.0 | 0.0 | 0.0 |
| DEX0450_033.nt.1 | 1234.0 | 51.7 | 51.7 | 80.0 | 80.0 | 21.4 | 21.4 | 57.1 | 57.1 | 46.7 | 46.7 |
| DEX0450_033.nt.2 | 5421.0 | 44.8 | 44.8 | 33.3 | 33.3 | 57.1 | 57.1 | 35.7 | 35.7 | 53.3 | 53.3 |
| DEX0450_036.nt.1 | 5961.0 | 0.0 | 0.0 | 0.0 | 0.0 | 0.0 | 0.0 | 0.0 | 0.0 | 0.0 | 0.0 |
| DEX0450_037.nt.1 | 1022.0 | 0.0 | 0.0 | 0.0 | 0.0 | 0.0 | 0.0 | 0.0 | 0.0 | 0.0 | 0.0 |
| DEX0450_037.nt.1 | 1023.0 | 0.0 | 0.0 | 0.0 | 0.0 | 0.0 | 0.0 | 0.0 | 0.0 | 0.0 | 0.0 |
| DEX0450_045.nt.1 | 5599.0 | 0.0 | 0.0 | 0.0 | 0.0 | 0.0 | 0.0 | 0.0 | 0.0 | 0.0 | 0.0 |

[0476] TABLE 8

| | | | Lng | | Lng | | Lng |
|---|---|---|---|---|---|---|---|
| | | Lng | Multi- | Lng | Multi- | Lng | Multi- |
| | | Multi- | Cancer | Multi- | Cancer | Multi- | Cancer |
| | | Cancer | ALL | Cancer | SQ | Cancer | AD |
| | Oligo | ALL % up | % valid | SQ % up | % valid | AD % up | % valid |
| DEX ID | Name | n = 22 | up n = 22 | n = 10 | up n = 10 | n = 12 | up n = 12 |
| DEX0450_025.nt.1 | 77759.0 | 31.8 | 33.3 | 30.0 | 30.0 | 33.3 | 36.4 |
| DEX0450_025.nt.1 | 77759.1 | 50.0 | 50.0 | 50.0 | 50.0 | 50.0 | 50.0 |
| DEX0450_031.nt.1 | 956.0 | 0.0 | 0.0 | 0.0 | 0.0 | 0.0 | 0.0 |

[0477] Ovarian Cancer Chips

[0478] For ovarian cancer two different chip designs were evaluated with overlapping sets of a total of 19 samples, comparing the expression patterns of ovarian cancer derived total RNA to total RNA isolated from a pool of 9 normal ovarian tissues. For the Multi-Cancer Array Chip, all 19 samples (14 invasive carcinomas, 5 low malignant potential samples were analyzed and for the Ovarian Array Chip, a subset of 17 of these samples (13 invasive carcinomas, 4 low malignant potential samples) were assessed.

[0479] The results for the statistically significant up-regulated genes on the Ovarian Array Chip are shown in Table 9. The results for the Multi-Cancer Array Chip are shown in Table 10. The first two columns of each table contain information about the sequence itself (DEX ID, Oligo Name), the next columns show the results obtained for all (“ALL”) ovarian cancer samples, invasive carcinomas (“INV”) and low malignant potential (“LMP”) samples. ‘% up’ indicates the percentage of all experiments in which up-regulation of at least 2-fold was observed (n=19 for the Multi-Cancer Array Chip, n=17 for the Ovarian Array Chip), ‘% valid up’ indicates the percentage of experiments with valid expression values in which up-regulation of at least 2-fold was observed.

TABLE 9

| | | Ovr | | Ovr | | Ovr | |
|---|---|---|---|---|---|---|---|
| | | ALL | Ovr ALL | INV | Ovr INV | LMP | Ovr LMP |
| | Oligo | % up | % valid up | % up | % valid up | % up | % valid |
| DEX ID | Name | n = 17 | n = 17 | n = 13 | n = 13 | n = 4 | up n = 4 |
| DEX0450_029.nt.1 | 37947.01 | 0.0 | 0.0 | 0.0 | 0.0 | 0.0 | 0.0 |
| DEX0450_029.nt.1 | 37947.02 | 0.0 | 0.0 | 0.0 | 0.0 | 0.0 | 0.0 |
| DEX0450_031.nt.1 | 9880.01 | 17.6 | 21.4 | 15.4 | 18.2 | 25.0 | 33.3 |
| DEX0450_031.nt.1 | 9880.02 | 17.6 | 18.8 | 15.4 | 16.7 | 25.0 | 25.0 |
| DEX0450_033.nt.1 | 18480.01 | 88.2 | 88.2 | 92.3 | 92.3 | 75.0 | 75.0 |
| DEX0450_033.nt.1 | 18480.02 | 88.2 | 88.2 | 92.3 | 92.3 | 75.0 | 75.0 |
| DEX0450_033.nt.2 | 18480.01 | 88.2 | 88.2 | 92.3 | 92.3 | 75.0 | 75.0 |
| DEX0450_033.nt.2 | 18480.02 | 88.2 | 88.2 | 92.3 | 92.3 | 75.0 | 75.0 |
| DEX0450_037.nt.1 | 12335.01 | 5.9 | 5.9 | 7.7 | 7.7 | 0.0 | 0.0 |
| DEX0450_037.nt.1 | 12335.02 | 5.9 | 5.9 | 7.7 | 7.7 | 0.0 | 0.0 |

[0480] TABLE 10

| | | | Ovr | | Ovr | | Ovr |
|---|---|---|---|---|---|---|---|
| | | Ovr | Multi- | Ovr | Multi- | Ovr | Multi- |
| | | Multi- | Cancer | Multi- | Cancer | Multi- | Cancer |
| | | Cancer | ALL | Cancer | INV | Cancer | LMP |
| | Oligo | ALL % up | % valid | INV % up | % valid | LMP % up | % valid |
| DEX ID | Name | n = 19 | up n = 19 | n = 14 | up n = 14 | n = 5 | up n = 5 |
| DEX0450_025.nt.1 | 77759.0 | 5.3 | 5.9 | 7.1 | 7.7 | 0.0 | 0.0 |
| DEX0450_025.nt.1 | 77759.1 | 5.3 | 6.2 | 7.1 | 8.3 | 0.0 | 0.0 |
| DEX0450_031.nt.1 | 956.0 | 10.5 | 15.4 | 7.1 | 11.1 | 20.0 | 25.0 |

[0481] Prostate Cancer

[0482] For prostate cancer three different chip designs were evaluated with overlapping sets of a total of 29 samples, comparing the expression patterns of prostate cancer or benign disease derived total RNA to total RNA isolated from a pool of 35 normal prostate tissues. For the Prostate1 Array and Prostate2 Array Chips all 29 samples (17 prostate cancer samples, 12 non-malignant disease samples) were analyzed. For the Multi-Cancer Array Chip a subset of 28 of these samples (16 prostate cancer samples, 12 non-malignant disease samples) were analyzed.

[0483] The results for the statistically significant up-regulated genes on the Prostate1 Array Chip and the Prostate2 Array Chip are shown in Table 11. The results for the statistically significant up-regulated genes on the Multi-Cancer Array Chip are shown in Table 12. The first two columns of each table contain information about the sequence itself (DEX ID, Oligo Name), the next columns show the results obtained for prostate cancer samples (“CAN”) or non-malignant disease samples (“DIS”). ‘% up’ indicates the percentage of all experiments in which up-regulation of at least 2-fold was observed (n=29 for the Prostate2 Array Chip and the Multi-Cancer Array Chip), ‘% valid up’ indicates the percentage of experiments with valid expression values in which up-regulation of at least 2-fold was observed.

TABLE 11

| | | | Pro | | Pro DIS |
|---|---|---|---|---|---|
| | | Pro CAN | CAN % | Pro DIS | % valid |
| | Oligo | % up | valid up | % up | up |
| DEX ID | Name | n = 17 | n = 17 | n = 12 | n = 12 |
| DEX0450_031.nt.1 | 38723.02 | 0.0 | 0.0 | 0.0 | 0.0 |
| DEX0450_031.nt.1 | 38723.03 | 0.0 | 0.0 | 0.0 | 0.0 |
| DEX0450_032.nt.1 | 32036.01 | 0.0 | 0.0 | 0.0 | 0.0 |
| DEX0450_032.nt.1 | 32036.02 | 0.0 | 0.0 | 0.0 | 0.0 |
| DEX0450_032.nt.1 | 35907.01 | 0.0 | 0.0 | 0.0 | 0.0 |
| DEX0450_032.nt.1 | 35907.02 | 0.0 | 0.0 | 0.0 | 0.0 |
| DEX0450_032.nt.1 | 35907.03 | 0.0 | 0.0 | 0.0 | 0.0 |
| DEX0450_032.nt.1 | 35945.01 | 0.0 | 0.0 | 0.0 | 0.0 |
| DEX0450_032.nt.1 | 35945.02 | 0.0 | 0.0 | 0.0 | 0.0 |
| DEX0450_032.nt.1 | 35945.03 | 0.0 | 0.0 | 0.0 | 0.0 |
| DEX0450_032.nt.1 | 35955.01 | 0.0 | 0.0 | 0.0 | 0.0 |
| DEX0450_032.nt.1 | 35955.02 | 0.0 | 0.0 | 0.0 | 0.0 |
| DEX0450_032.nt.1 | 35955.03 | 0.0 | 0.0 | 0.0 | 0.0 |
| DEX0450_032.nt.2 | 26953.01 | 0.0 | 0.0 | 0.0 | 0.0 |
| DEX0450_032.nt.2 | 26953.02 | 0.0 | 0.0 | 0.0 | 0.0 |
| DEX0450_032.nt.2 | 31256.01 | 0.0 | 0.0 | 0.0 | 0.0 |
| DEX0450_032.nt.2 | 31256.02 | 0.0 | 0.0 | 0.0 | 0.0 |
| DEX0450_032.nt.2 | 31256.03 | 0.0 | 0.0 | 0.0 | 0.0 |
| DEX0450_032.nt.2 | 32020.01 | 0.0 | 0.0 | 0.0 | 0.0 |
| DEX0450_032.nt.2 | 32020.02 | 0.0 | 0.0 | 0.0 | 0.0 |
| DEX0450_032.nt.2 | 32036.01 | 0.0 | 0.0 | 0.0 | 0.0 |
| DEX0450_032.nt.2 | 32036.02 | 0.0 | 0.0 | 0.0 | 0.0 |
| DEX0450_032.nt.2 | 35897.01 | 0.0 | 0.0 | 0.0 | 0.0 |
| DEX0450_032.nt.2 | 35897.02 | 0.0 | 0.0 | 0.0 | 0.0 |
| DEX0450_032.nt.2 | 35897.03 | 0.0 | 0.0 | 0.0 | 0.0 |
| DEX0450_032.nt.2 | 35901.01 | 0.0 | 0.0 | 0.0 | 0.0 |
| DEX0450_032.nt.2 | 35901.02 | 0.0 | 0.0 | 0.0 | 0.0 |
| DEX0450_032.nt.2 | 35901.03 | 0.0 | 0.0 | 0.0 | 0.0 |
| DEX0450_032.nt.2 | 35905.01 | 0.0 | 0.0 | 0.0 | 0.0 |
| DEX0450_032.nt.2 | 35905.02 | 0.0 | 0.0 | 0.0 | 0.0 |
| DEX0450_032.nt.2 | 35905.03 | 0.0 | 0.0 | 0.0 | 0.0 |
| DEX0450_032.nt.2 | 35907.01 | 0.0 | 0.0 | 0.0 | 0.0 |
| DEX0450_032.nt.2 | 35907.02 | 0.0 | 0.0 | 0.0 | 0.0 |
| DEX0450_032.nt.2 | 35907.03 | 0.0 | 0.0 | 0.0 | 0.0 |
| DEX0450_032.nt.2 | 35919.01 | 0.0 | 0.0 | 0.0 | 0.0 |
| DEX0450_032.nt.2 | 35919.02 | 0.0 | 0.0 | 0.0 | 0.0 |
| DEX0450_032.nt.2 | 35919.03 | 0.0 | 0.0 | 0.0 | 0.0 |
| DEX0450_032.nt.2 | 35945.01 | 0.0 | 0.0 | 0.0 | 0.0 |
| DEX0450_032.nt.2 | 35945.02 | 0.0 | 0.0 | 0.0 | 0.0 |
| DEX0450_032.nt.2 | 35945.03 | 0.0 | 0.0 | 0.0 | 0.0 |
| DEX0450_032.nt.2 | 35951.01 | 0.0 | 0.0 | 0.0 | 0.0 |
| DEX0450_032.nt.2 | 35951.02 | 0.0 | 0.0 | 0.0 | 0.0 |
| DEX0450_032.nt.2 | 35951.03 | 0.0 | 0.0 | 0.0 | 0.0 |
| DEX0450_032.nt.2 | 35955.01 | 0.0 | 0.0 | 0.0 | 0.0 |
| DEX0450_032.nt.2 | 35955.02 | 0.0 | 0.0 | 0.0 | 0.0 |
| DEX0450_032.nt.2 | 35955.03 | 0.0 | 0.0 | 0.0 | 0.0 |
| DEX0450_032.nt.2 | 35957.01 | 0.0 | 0.0 | 0.0 | 0.0 |
| DEX0450_032.nt.2 | 35957.02 | 0.0 | 0.0 | 0.0 | 0.0 |
| DEX0450_032.nt.2 | 35957.03 | 0.0 | 0.0 | 0.0 | 0.0 |
| DEX0450_032.nt.2 | 35959.01 | 0.0 | 0.0 | 0.0 | 0.0 |
| DEX0450_032.nt.2 | 35959.02 | 0.0 | 0.0 | 0.0 | 0.0 |
| DEX0450_032.nt.2 | 35959.03 | 0.0 | 0.0 | 0.0 | 0.0 |
| DEX0450_032.nt.3 | 26953.01 | 0.0 | 0.0 | 0.0 | 0.0 |
| DEX0450_032.nt.3 | 26953.02 | 0.0 | 0.0 | 0.0 | 0.0 |
| DEX0450_032.nt.3 | 31256.01 | 0.0 | 0.0 | 0.0 | 0.0 |
| DEX0450_032.nt.3 | 31256.02 | 0.0 | 0.0 | 0.0 | 0.0 |
| DEX0450_032.nt.3 | 31256.03 | 0.0 | 0.0 | 0.0 | 0.0 |
| DEX0450_032.nt.3 | 32020.01 | 0.0 | 0.0 | 0.0 | 0.0 |
| DEX0450_032.nt.3 | 32020.02 | 0.0 | 0.0 | 0.0 | 0.0 |
| DEX0450_032.nt.3 | 32036.01 | 0.0 | 0.0 | 0.0 | 0.0 |
| DEX0450_032.nt.3 | 32036.02 | 0.0 | 0.0 | 0.0 | 0.0 |
| DEX0450_032.nt.3 | 35897.01 | 0.0 | 0.0 | 0.0 | 0.0 |
| DEX0450_032.nt.3 | 35897.02 | 0.0 | 0.0 | 0.0 | 0.0 |
| DEX0450_032.nt.3 | 35897.03 | 0.0 | 0.0 | 0.0 | 0.0 |
| DEX0450_032.nt.3 | 35901.01 | 0.0 | 0.0 | 0.0 | 0.0 |
| DEX0450_032.nt.3 | 35901.02 | 0.0 | 0.0 | 0.0 | 0.0 |
| DEX0450_032.nt.3 | 35901.03 | 0.0 | 0.0 | 0.0 | 0.0 |
| DEX0450_032.nt.3 | 35905.01 | 0.0 | 0.0 | 0.0 | 0.0 |
| DEX0450_032.nt.3 | 35905.02 | 0.0 | 0.0 | 0.0 | 0.0 |
| DEX0450_032.nt.3 | 35905.03 | 0.0 | 0.0 | 0.0 | 0.0 |
| DEX0450_032.nt.3 | 35907.01 | 0.0 | 0.0 | 0.0 | 0.0 |
| DEX0450_032.nt.3 | 35907.02 | 0.0 | 0.0 | 0.0 | 0.0 |
| DEX0450_032.nt.3 | 35907.03 | 0.0 | 0.0 | 0.0 | 0.0 |
| DEX0450_032.nt.3 | 35919.01 | 0.0 | 0.0 | 0.0 | 0.0 |
| DEX0450_032.nt.3 | 35919.02 | 0.0 | 0.0 | 0.0 | 0.0 |
| DEX0450_032.nt.3 | 35919.03 | 0.0 | 0.0 | 0.0 | 0.0 |
| DEX0450_032.nt.3 | 35945.01 | 0.0 | 0.0 | 0.0 | 0.0 |
| DEX0450_032.nt.3 | 35945.02 | 0.0 | 0.0 | 0.0 | 0.0 |
| DEX0450_032.nt.3 | 35945.03 | 0.0 | 0.0 | 0.0 | 0.0 |
| DEX0450_032.nt.3 | 35951.01 | 0.0 | 0.0 | 0.0 | 0.0 |
| DEX0450_032.nt.3 | 35951.02 | 0.0 | 0.0 | 0.0 | 0.0 |
| DEX0450_032.nt.3 | 35951.03 | 0.0 | 0.0 | 0.0 | 0.0 |
| DEX0450_032.nt.3 | 35955.01 | 0.0 | 0.0 | 0.0 | 0.0 |
| DEX0450_032.nt.3 | 35955.02 | 0.0 | 0.0 | 0.0 | 0.0 |
| DEX0450_032.nt.3 | 35955.03 | 0.0 | 0.0 | 0.0 | 0.0 |
| DEX0450_032.nt.3 | 35957.01 | 0.0 | 0.0 | 0.0 | 0.0 |
| DEX0450_032.nt.3 | 35957.02 | 0.0 | 0.0 | 0.0 | 0.0 |
| DEX0450_032.nt.3 | 35957.03 | 0.0 | 0.0 | 0.0 | 0.0 |
| DEX0450_032.nt.3 | 35959.01 | 0.0 | 0.0 | 0.0 | 0.0 |
| DEX0450_032.nt.3 | 35959.02 | 0.0 | 0.0 | 0.0 | 0.0 |
| DEX0450_032.nt.3 | 35959.03 | 0.0 | 0.0 | 0.0 | 0.0 |
| DEX0450_032.nt.4 | 26953.01 | 0.0 | 0.0 | 0.0 | 0.0 |
| DEX0450_032.nt.4 | 26953.02 | 0.0 | 0.0 | 0.0 | 0.0 |
| DEX0450_032.nt.4 | 31256.01 | 0.0 | 0.0 | 0.0 | 0.0 |
| DEX0450_032.nt.4 | 31256.02 | 0.0 | 0.0 | 0.0 | 0.0 |
| DEX0450_032.nt.4 | 31256.03 | 0.0 | 0.0 | 0.0 | 0.0 |
| DEX0450_032.nt.4 | 32020.01 | 0.0 | 0.0 | 0.0 | 0.0 |
| DEX0450_032.nt.4 | 32020.02 | 0.0 | 0.0 | 0.0 | 0.0 |
| DEX0450_032.nt.4 | 32036.01 | 0.0 | 0.0 | 0.0 | 0.0 |
| DEX0450_032.nt.4 | 32036.02 | 0.0 | 0.0 | 0.0 | 0.0 |
| DEX0450_032.nt.4 | 35897.01 | 0.0 | 0.0 | 0.0 | 0.0 |
| DEX0450_032.nt.4 | 35897.02 | 0.0 | 0.0 | 0.0 | 0.0 |
| DEX0450_032.nt.4 | 35897.03 | 0.0 | 0.0 | 0.0 | 0.0 |
| DEX0450_032.nt.4 | 35901.01 | 0.0 | 0.0 | 0.0 | 0.0 |
| DEX0450_032.nt.4 | 35901.02 | 0.0 | 0.0 | 0.0 | 0.0 |
| DEX0450_032.nt.4 | 35901.03 | 0.0 | 0.0 | 0.0 | 0.0 |
| DEX0450_032.nt.4 | 35905.01 | 0.0 | 0.0 | 0.0 | 0.0 |
| DEX0450_032.nt.4 | 35905.02 | 0.0 | 0.0 | 0.0 | 0.0 |
| DEX0450_032.nt.4 | 35905.03 | 0.0 | 0.0 | 0.0 | 0.0 |
| DEX0450_032.nt.4 | 35907.01 | 0.0 | 0.0 | 0.0 | 0.0 |
| DEX0450_032.nt.4 | 35907.02 | 0.0 | 0.0 | 0.0 | 0.0 |
| DEX0450_032.nt.4 | 35907.03 | 0.0 | 0.0 | 0.0 | 0.0 |
| DEX0450_032.nt.4 | 35919.01 | 0.0 | 0.0 | 0.0 | 0.0 |
| DEX0450_032.nt.4 | 35919.02 | 0.0 | 0.0 | 0.0 | 0.0 |
| DEX0450_032.nt.4 | 35919.03 | 0.0 | 0.0 | 0.0 | 0.0 |
| DEX0450_032.nt.4 | 35945.01 | 0.0 | 0.0 | 0.0 | 0.0 |
| DEX0450_032.nt.4 | 35945.02 | 0.0 | 0.0 | 0.0 | 0.0 |
| DEX0450_032.nt.4 | 35945.03 | 0.0 | 0.0 | 0.0 | 0.0 |
| DEX0450_032.nt.4 | 35951.01 | 0.0 | 0.0 | 0.0 | 0.0 |
| DEX0450_032.nt.4 | 35951.02 | 0.0 | 0.0 | 0.0 | 0.0 |
| DEX0450_032.nt.4 | 35951.03 | 0.0 | 0.0 | 0.0 | 0.0 |
| DEX0450_032.nt.4 | 35955.01 | 0.0 | 0.0 | 0.0 | 0.0 |
| DEX0450_032.nt.4 | 35955.02 | 0.0 | 0.0 | 0.0 | 0.0 |
| DEX0450_032.nt.4 | 35955.03 | 0.0 | 0.0 | 0.0 | 0.0 |
| DEX0450_032.nt.4 | 35957.01 | 0.0 | 0.0 | 0.0 | 0.0 |
| DEX0450_032.nt.4 | 35957.02 | 0.0 | 0.0 | 0.0 | 0.0 |
| DEX0450_032.nt.4 | 35957.03 | 0.0 | 0.0 | 0.0 | 0.0 |
| DEX0450_032.nt.4 | 35959.01 | 0.0 | 0.0 | 0.0 | 0.0 |
| DEX0450_032.nt.4 | 35959.02 | 0.0 | 0.0 | 0.0 | 0.0 |
| DEX0450_032.nt.4 | 35959.03 | 0.0 | 0.0 | 0.0 | 0.0 |
| DEX0450_032.nt.5 | 26953.01 | 0.0 | 0.0 | 0.0 | 0.0 |
| DEX0450_032.nt.5 | 26953.02 | 0.0 | 0.0 | 0.0 | 0.0 |
| DEX0450_032.nt.5 | 31256.01 | 0.0 | 0.0 | 0.0 | 0.0 |
| DEX0450_032.nt.5 | 31256.02 | 0.0 | 0.0 | 0.0 | 0.0 |
| DEX0450_032.nt.5 | 31256.03 | 0.0 | 0.0 | 0.0 | 0.0 |
| DEX0450_032.nt.5 | 32020.01 | 0.0 | 0.0 | 0.0 | 0.0 |
| DEX0450_032.nt.5 | 32020.02 | 0.0 | 0.0 | 0.0 | 0.0 |
| DEX0450_032.nt.5 | 32036.01 | 0.0 | 0.0 | 0.0 | 0.0 |
| DEX0450_032.nt.5 | 32036.02 | 0.0 | 0.0 | 0.0 | 0.0 |
| DEX0450_032.nt.5 | 35897.01 | 0.0 | 0.0 | 0.0 | 0.0 |
| DEX0450_032.nt.5 | 35897.02 | 0.0 | 0.0 | 0.0 | 0.0 |
| DEX0450_032.nt.5 | 35897.03 | 0.0 | 0.0 | 0.0 | 0.0 |
| DEX0450_032.nt.5 | 35901.01 | 0.0 | 0.0 | 0.0 | 0.0 |
| DEX0450_032.nt.5 | 35901.02 | 0.0 | 0.0 | 0.0 | 0.0 |
| DEX0450_032.nt.5 | 35901.03 | 0.0 | 0.0 | 0.0 | 0.0 |
| DEX0450_032.nt.5 | 35905.01 | 0.0 | 0.0 | 0.0 | 0.0 |
| DEX0450_032.nt.5 | 35905.02 | 0.0 | 0.0 | 0.0 | 0.0 |
| DEX0450_032.nt.5 | 35905.03 | 0.0 | 0.0 | 0.0 | 0.0 |
| DEX0450_032.nt.5 | 35907.01 | 0.0 | 0.0 | 0.0 | 0.0 |
| DEX0450_032.nt.5 | 35907.02 | 0.0 | 0.0 | 0.0 | 0.0 |
| DEX0450_032.nt.5 | 35907.03 | 0.0 | 0.0 | 0.0 | 0.0 |
| DEX0450_032.nt.5 | 35919.01 | 0.0 | 0.0 | 0.0 | 0.0 |
| DEX0450_032.nt.5 | 35919.02 | 0.0 | 0.0 | 0.0 | 0.0 |
| DEX0450_032.nt.5 | 35919.03 | 0.0 | 0.0 | 0.0 | 0.0 |
| DEX0450_032.nt.5 | 35945.01 | 0.0 | 0.0 | 0.0 | 0.0 |
| DEX0450_032.nt.5 | 35945.02 | 0.0 | 0.0 | 0.0 | 0.0 |
| DEX0450_032.nt.5 | 35945.03 | 0.0 | 0.0 | 0.0 | 0.0 |
| DEX0450_032.nt.5 | 35951.01 | 0.0 | 0.0 | 0.0 | 0.0 |
| DEX0450_032.nt.5 | 35951.02 | 0.0 | 0.0 | 0.0 | 0.0 |
| DEX0450_032.nt.5 | 35951.03 | 0.0 | 0.0 | 0.0 | 0.0 |
| DEX0450_032.nt.5 | 35955.01 | 0.0 | 0.0 | 0.0 | 0.0 |
| DEX0450_032.nt.5 | 35955.02 | 0.0 | 0.0 | 0.0 | 0.0 |
| DEX0450_032.nt.5 | 35955.03 | 0.0 | 0.0 | 0.0 | 0.0 |
| DEX0450_032.nt.5 | 35957.01 | 0.0 | 0.0 | 0.0 | 0.0 |
| DEX0450_032.nt.5 | 35957.02 | 0.0 | 0.0 | 0.0 | 0.0 |
| DEX0450_032.nt.5 | 35957.03 | 0.0 | 0.0 | 0.0 | 0.0 |
| DEX0450_032.nt.5 | 35959.01 | 0.0 | 0.0 | 0.0 | 0.0 |
| DEX0450_032.nt.5 | 35959.02 | 0.0 | 0.0 | 0.0 | 0.0 |
| DEX0450_032.nt.5 | 35959.03 | 0.0 | 0.0 | 0.0 | 0.0 |
| DEX0450_032.nt.6 | 26953.01 | 0.0 | 0.0 | 0.0 | 0.0 |
| DEX0450_032.nt.6 | 26953.02 | 0.0 | 0.0 | 0.0 | 0.0 |
| DEX0450_032.nt.6 | 31256.01 | 0.0 | 0.0 | 0.0 | 0.0 |
| DEX0450_032.nt.6 | 31256.02 | 0.0 | 0.0 | 0.0 | 0.0 |
| DEX0450_032.nt.6 | 31256.03 | 0.0 | 0.0 | 0.0 | 0.0 |
| DEX0450_032.nt.6 | 32020.01 | 0.0 | 0.0 | 0.0 | 0.0 |
| DEX0450_032.nt.6 | 32020.02 | 0.0 | 0.0 | 0.0 | 0.0 |
| DEX0450_032.nt.6 | 32036.01 | 0.0 | 0.0 | 0.0 | 0.0 |
| DEX0450_032.nt.6 | 32036.02 | 0.0 | 0.0 | 0.0 | 0.0 |
| DEX0450_032.nt.6 | 35897.01 | 0.0 | 0.0 | 0.0 | 0.0 |
| DEX0450_032.nt.6 | 35897.02 | 0.0 | 0.0 | 0.0 | 0.0 |
| DEX0450_032.nt.6 | 35897.03 | 0.0 | 0.0 | 0.0 | 0.0 |
| DEX0450_032.nt.6 | 35901.01 | 0.0 | 0.0 | 0.0 | 0.0 |
| DEX0450_032.nt.6 | 35901.02 | 0.0 | 0.0 | 0.0 | 0.0 |
| DEX0450_032.nt.6 | 35901.03 | 0.0 | 0.0 | 0.0 | 0.0 |
| DEX0450_032.nt.6 | 35905.01 | 0.0 | 0.0 | 0.0 | 0.0 |
| DEX0450_032.nt.6 | 35905.02 | 0.0 | 0.0 | 0.0 | 0.0 |
| DEX0450_032.nt.6 | 35905.03 | 0.0 | 0.0 | 0.0 | 0.0 |
| DEX0450_032.nt.6 | 35907.01 | 0.0 | 0.0 | 0.0 | 0.0 |
| DEX0450_032.nt.6 | 35907.02 | 0.0 | 0.0 | 0.0 | 0.0 |
| DEX0450_032.nt.6 | 35907.03 | 0.0 | 0.0 | 0.0 | 0.0 |
| DEX0450_032.nt.6 | 35919.01 | 0.0 | 0.0 | 0.0 | 0.0 |
| DEX0450_032.nt.6 | 35919.02 | 0.0 | 0.0 | 0.0 | 0.0 |
| DEX0450_032.nt.6 | 35919.03 | 0.0 | 0.0 | 0.0 | 0.0 |
| DEX0450_032.nt.6 | 35945.01 | 0.0 | 0.0 | 0.0 | 0.0 |
| DEX0450_032.nt.6 | 35945.02 | 0.0 | 0.0 | 0.0 | 0.0 |
| DEX0450_032.nt.6 | 35945.03 | 0.0 | 0.0 | 0.0 | 0.0 |
| DEX0450_032.nt.6 | 35951.01 | 0.0 | 0.0 | 0.0 | 0.0 |
| DEX0450_032.nt.6 | 35951.02 | 0.0 | 0.0 | 0.0 | 0.0 |
| DEX0450_032.nt.6 | 35951.03 | 0.0 | 0.0 | 0.0 | 0.0 |
| DEX0450_032.nt.6 | 35955.01 | 0.0 | 0.0 | 0.0 | 0.0 |
| DEX0450_032.nt.6 | 35955.02 | 0.0 | 0.0 | 0.0 | 0.0 |
| DEX0450_032.nt.6 | 35955.03 | 0.0 | 0.0 | 0.0 | 0.0 |
| DEX0450_032.nt.6 | 35957.01 | 0.0 | 0.0 | 0.0 | 0.0 |
| DEX0450_032.nt.6 | 35957.02 | 0.0 | 0.0 | 0.0 | 0.0 |
| DEX0450_032.nt.6 | 35957.03 | 0.0 | 0.0 | 0.0 | 0.0 |
| DEX0450_032.nt.6 | 35959.01 | 0.0 | 0.0 | 0.0 | 0.0 |
| DEX0450_032.nt.6 | 35959.02 | 0.0 | 0.0 | 0.0 | 0.0 |
| DEX0450_032.nt.6 | 35959.03 | 0.0 | 0.0 | 0.0 | 0.0 |
| DEX0450_032.nt.7 | 26953.01 | 0.0 | 0.0 | 0.0 | 0.0 |
| DEX0450_032.nt.7 | 26953.02 | 0.0 | 0.0 | 0.0 | 0.0 |
| DEX0450_032.nt.7 | 31256.01 | 0.0 | 0.0 | 0.0 | 0.0 |
| DEX0450_032.nt.7 | 31256.02 | 0.0 | 0.0 | 0.0 | 0.0 |
| DEX0450_032.nt.7 | 31256.03 | 0.0 | 0.0 | 0.0 | 0.0 |
| DEX0450_032.nt.7 | 32020.01 | 0.0 | 0.0 | 0.0 | 0.0 |
| DEX0450_032.nt.7 | 32020.02 | 0.0 | 0.0 | 0.0 | 0.0 |
| DEX0450_032.nt.7 | 32036.01 | 0.0 | 0.0 | 0.0 | 0.0 |
| DEX0450_032.nt.7 | 32036.02 | 0.0 | 0.0 | 0.0 | 0.0 |
| DEX0450_032.nt.7 | 35901.01 | 0.0 | 0.0 | 0.0 | 0.0 |
| DEX0450_032.nt.7 | 35901.02 | 0.0 | 0.0 | 0.0 | 0.0 |
| DEX0450_032.nt.7 | 35901.03 | 0.0 | 0.0 | 0.0 | 0.0 |
| DEX0450_032.nt.7 | 35905.01 | 0.0 | 0.0 | 0.0 | 0.0 |
| DEX0450_032.nt.7 | 35905.02 | 0.0 | 0.0 | 0.0 | 0.0 |
| DEX0450_032.nt.7 | 35905.03 | 0.0 | 0.0 | 0.0 | 0.0 |
| DEX0450_032.nt.7 | 35907.01 | 0.0 | 0.0 | 0.0 | 0.0 |
| DEX0450_032.nt.7 | 35907.02 | 0.0 | 0.0 | 0.0 | 0.0 |
| DEX0450_032.nt.7 | 35907.03 | 0.0 | 0.0 | 0.0 | 0.0 |
| DEX0450_032.nt.7 | 35919.01 | 0.0 | 0.0 | 0.0 | 0.0 |
| DEX0450_032.nt.7 | 35919.02 | 0.0 | 0.0 | 0.0 | 0.0 |
| DEX0450_032.nt.7 | 35919.03 | 0.0 | 0.0 | 0.0 | 0.0 |
| DEX0450_032.nt.7 | 35945.01 | 0.0 | 0.0 | 0.0 | 0.0 |
| DEX0450_032.nt.7 | 35945.02 | 0.0 | 0.0 | 0.0 | 0.0 |
| DEX0450_032.nt.7 | 35945.03 | 0.0 | 0.0 | 0.0 | 0.0 |
| DEX0450_032.nt.7 | 35951.01 | 0.0 | 0.0 | 0.0 | 0.0 |
| DEX0450_032.nt.7 | 35951.02 | 0.0 | 0.0 | 0.0 | 0.0 |
| DEX0450_032.nt.7 | 35951.03 | 0.0 | 0.0 | 0.0 | 0.0 |
| DEX0450_032.nt.7 | 35955.01 | 0.0 | 0.0 | 0.0 | 0.0 |
| DEX0450_032.nt.7 | 35955.02 | 0.0 | 0.0 | 0.0 | 0.0 |
| DEX0450_032.nt.7 | 35955.03 | 0.0 | 0.0 | 0.0 | 0.0 |
| DEX0450_033.nt.2 | 24954.01 | 0.0 | 0.0 | 0.0 | 0.0 |
| DEX0450_033.nt.2 | 24954.02 | 0.0 | 0.0 | 0.0 | 0.0 |
| DEX0450_033.nt.2 | 28019.01 | 5.9 | 5.9 | 0.0 | 0.0 |
| DEX0450_033.nt.2 | 28019.02 | 0.0 | 0.0 | 0.0 | 0.0 |
| DEX0450_037.nt.1 | 29065.01 | 0.0 | 0.0 | 8.3 | 8.3 |
| DEX0450_037.nt.1 | 29065.02 | 0.0 | 0.0 | 8.3 | 8.3 |
| DEX0450_037.nt.1 | 29065.03 | 0.0 | 0.0 | 8.3 | 8.3 |
| DEX0450_037.nt.1 | 29069.01 | 0.0 | 0.0 | 0.0 | 0.0 |
| DEX0450_037.nt.1 | 29069.02 | 0.0 | 0.0 | 0.0 | 0.0 |
| DEX0450_037.nt.1 | 29069.03 | 0.0 | 0.0 | 0.0 | 0.0 |
| DEX0450_037.nt.1 | 36689.01 | 0.0 | 0.0 | 0.0 | 0.0 |
| DEX0450_037.nt.1 | 36689.02 | 0.0 | 0.0 | 0.0 | 0.0 |
| DEX0450_041.nt.1 | 29311.01 | 0.0 | 0.0 | 0.0 | 0.0 |
| DEX0450_041.nt.1 | 29311.02 | 0.0 | 0.0 | 0.0 | 0.0 |
| DEX0450_041.nt.1 | 29311.03 | 0.0 | 0.0 | 0.0 | 0.0 |
| DEX0450_041.nt.1 | 29313.01 | 0.0 | 0.0 | 0.0 | 0.0 |
| DEX0450_041.nt.1 | 29313.02 | 0.0 | 0.0 | 0.0 | 0.0 |
| DEX0450_041.nt.1 | 29313.03 | 0.0 | 0.0 | 0.0 | 0.0 |

[0484] TABLE 12

| | | | Pro Multi- | | Pro Multi- |
|---|---|---|---|---|---|
| | | Pro Multi- | Cancer CAN | Pro Multi- | Cancer DIS |
| | Oligo | Cancer CAN | % valid up | Cancer DIS | % valid up |
| DEX ID | Name | % up n = 16 | n = 16 | % up n = 12 | n = 12 |
| DEX0450_025.nt.1 | 77759.0 | 0.0 | 0.0 | 0.0 | 0.0 |
| DEX0450_025.nt.1 | 77759.1 | 0.0 | 0.0 | 0.0 | 0.0 |
| DEX0450_031.nt.1 | 956.0 | 0.0 | 0.0 | 0.0 | 0.0 |

SEQ ID NO: 1-94 was up-regulated on various tissue microarrays. Accordingly, nucleotide SEQ ID NO: 1-94 or the encoded protein SEQ ID NO: 95-248 may be used as a cancer therapeutic and/or diagnostic target for the tissues in which expression is shown.

[0485] The following table lists the location (Oligo Location) where the microarray oligos (Oligo ID) map on the transcripts (DEX ID) of the present invention. Each Oligo ID may have been printed multiple times on a single chip as replicates. The Oligo Name is an exemplary replicate (e.g. 1000.01) for the Oligo ID (e.g. 1000), and data from other replicates (e.g. 1000.02, 1000.03) may be reported. Additionally, the Array (Chip Name) that each oligo and oligo replicates were printed on is included.

| DEX ID | Oligo ID | Oligo Name | Chip Name | Oligo Location |
|---|---|---|---|---|
| DEX0450_001.nt.1 | 2383 | 2383.0 | Lung array | 1925-1984 |
| DEX0450_001.nt.1 | 4832 | 4832.0 | Lung array | 1101-1160 |
| DEX0450_001.nt.1 | 4831 | 4831.0 | Lung array | 376-435 |
| DEX0450_001.nt.1 | 2404 | 2404.0 | Lung array | 1925-1984 |
| DEX0450_001.nt.1 | 2405 | 2405.0 | Multi-Cancer array | 1918-1977 |
| DEX0450_001.nt.1 | 2400 | 2400.0 | Lung array | 611-670 |
| DEX0450_002.nt.1 | 31163 | 31163.0 | Colon array | 1644-1703 |
| DEX0450_002.nt.1 | 34075 | 34075.0 | Colon array | 2521-2580 |
| DEX0450_002.nt.1 | 31158 | 31158.0 | Colon array | 2221-2280 |
| DEX0450_002.nt.1 | 31162 | 31162.0 | Colon array | 1666-1725 |
| DEX0450_002.nt.1 | 31003 | 31003.0 | Colon array | 1156-1215 |
| DEX0450_002.nt.1 | 34074 | 34074.0 | Colon array | 2597-2656 |
| DEX0450_002.nt.1 | 31159 | 31159.0 | Colon array | 2168-2227 |
| DEX0450_003.nt.1 | 31446 | 31446.0 | Colon array | 37-96 |
| DEX0450_003.nt.2 | 31447 | 31447.0 | Colon array | 3391-3450 |
| DEX0450_003.nt.2 | 31446 | 31446.0 | Colon array | 3635-3694 |
| DEX0450_003.nt.3 | 31447 | 31447.0 | Colon array | 2288-2347 |
| DEX0450_003.nt.3 | 31443 | 31443.0 | Colon array | 1628-1687 |
| DEX0450_004.nt.1 | 10720 | 10720.0 | Colon array | 260-319 |
| DEX0450_004.nt.1 | 10721 | 10721.0 | Colon array | 220-279 |
| DEX0450_005.nt.1 | 38049 | 38049.0 | Colon array | 2673-2732 |
| DEX0450_005.nt.1 | 16776 | 16776.0 | Colon array | 422-481 |
| DEX0450_005.nt.1 | 16777 | 16777.0 | Colon array | 336-395 |
| DEX0450_005.nt.1 | 38050 | 38050.0 | Colon array | 2564-2623 |
| DEX0450_006.nt.1 | 35170 | 35170.0 | Colon array | 511-570 |
| DEX0450_006.nt.1 | 35171 | 35171.0 | Colon array | 461-520 |
| DEX0450_007.nt.1 | 35170 | 35170.0 | Colon array | 3353-3412 |
| DEX0450_008.nt.1 | 30228 | 30228.0 | Colon array | 2517-2576 |
| DEX0450_008.nt.1 | 30227 | 30227.0 | Colon array | 2563-2622 |
| DEX0450_009.nt.1 | 39839 | 39839.0 | Colon array | 975-1034 |
| DEX0450_009.nt.1 | 39840 | 39840.0 | Colon array | 822-881 |
| DEX0450_009.nt.2 | 39839 | 39839.0 | Colon array | 1702-1761 |
| DEX0450_009.nt.2 | 39840 | 39840.0 | Colon array | 1549-1608 |
| DEX0450_010.nt.1 | 29571 | 29571.0 | Colon array | 79-138 |
| DEX0450_010.nt.1 | 29612 | 29612.0 | Colon array | 456-515 |
| DEX0450_010.nt.1 | 29595 | 29595.0 | Colon array | 493-552 |
| DEX0450_010.nt.1 | 29609 | 29609.0 | Colon array | 486-545 |
| DEX0450_010.nt.1 | 22376 | 22376.0 | Breast array | 482-541 |
| DEX0450_010.nt.1 | 29582 | 29582.0 | Colon array | 482-541 |
| DEX0450_010.nt.1 | 29611 | 29611.0 | Colon array | 493-552 |
| DEX0450_010.nt.1 | 17829 | 17829.0 | Breast array | 87-146 |
| DEX0450_010.nt.2 | 29611 | 29611.0 | Colon array | 299-358 |
| DEX0450_010.nt.2 | 29595 | 29595.0 | Colon array | 299-358 |
| DEX0450_010.nt.2 | 22376 | 22376.0 | Breast array | 288-347 |
| DEX0450_010.nt.2 | 29582 | 29582.0 | Colon array | 288-347 |
| DEX0450_010.nt.2 | 29609 | 29609.0 | Colon array | 292-351 |
| DEX0450_010.nt.2 | 29612 | 29612.0 | Colon array | 262-321 |
| DEX0450_010.nt.3 | 36747 | 36747.0 | Colon array | 2355-2414 |
| DEX0450_010.nt.3 | 29595 | 29595.0 | Colon array | 4246-4305 |
| DEX0450_010.nt.3 | 29612 | 29612.0 | Colon array | 4209-4268 |
| DEX0450_010.nt.3 | 29582 | 29582.0 | Colon array | 4235-4294 |
| DEX0450_010.nt.3 | 29572 | 29572.0 | Colon array | 3762-3821 |
| DEX0450_010.nt.3 | 29611 | 29611.0 | Colon array | 4246-4305 |
| DEX0450_010.nt.3 | 17829 | 17829.0 | Breast array | 3840-3899 |
| DEX0450_010.nt.3 | 29571 | 29571.0 | Colon array | 3832-3891 |
| DEX0450_010.nt.3 | 29609 | 29609.0 | Colon array | 4239-4298 |
| DEX0450_010.nt.3 | 22376 | 22376.0 | Breast array | 4235-4294 |
| DEX0450_011.nt.1 | 22654 | 22654.0 | Colon array | 1967-2026 |
| DEX0450_012.nt.1 | 8377 | 8377.0 | Colon array | 406-465 |
| DEX0450_013.nt.1 | 32221 | 32221.0 | Colon array | 1359-1418 |
| DEX0450_013.nt.1 | 32254 | 32254.0 | Colon array | 390-449 |
| DEX0450_013.nt.1 | 33033 | 33033.0 | Colon array | 635-694 |
| DEX0450_013.nt.1 | 32255 | 32255.0 | Colon array | 266-325 |
| DEX0450_013.nt.1 | 32220 | 32220.0 | Colon array | 1399-1458 |
| DEX0450_014.nt.1 | 32458 | 32458.0 | Colon array | 1846-1905 |
| DEX0450_014.nt.1 | 32459 | 32459.0 | Colon array | 1806-1865 |
| DEX0450_015.nt.1 | 33503 | 33503.0 | Colon array | 7026-7085 |
| DEX0450_016.nt.1 | 35091 | 35091.0 | Colon array | 3392-3451 |
| DEX0450_016.nt.1 | 33083 | 33083.0 | Colon array | 2718-2777 |
| DEX0450_016.nt.2 | 35091 | 35091.0 | Colon array | 2518-2577 |
| DEX0450_016.nt.3 | 33083 | 33083.0 | Colon array | 2835-2894 |
| DEX0450_016.nt.3 | 35091 | 35091.0 | Colon array | 3509-3568 |
| DEX0450_017.nt.1 | 36711 | 36711.0 | Colon array | 484-543 |
| DEX0450_017.nt.1 | 39770 | 39770.0 | Colon array | 486-545 |
| DEX0450_017.nt.1 | 39635 | 39635.0 | Colon array | 652-711 |
| DEX0450_017.nt.1 | 36712 | 36712.0 | Colon array | 342-401 |
| DEX0450_017.nt.1 | 39769 | 39769.0 | Colon array | 526-585 |
| DEX0450_017.nt.1 | 39631 | 39631.0 | Colon array | 651-710 |
| DEX0450_017.nt.1 | 39636 | 39636.0 | Colon array | 612-671 |
| DEX0450_017.nt.2 | 39770 | 39770.0 | Colon array | 266-325 |
| DEX0450_017.nt.2 | 39769 | 39769.0 | Colon array | 306-365 |
| DEX0450_017.nt.2 | 36711 | 36711.0 | Colon array | 264-323 |
| DEX0450_017.nt.2 | 39631 | 39631.0 | Colon array | 431-490 |
| DEX0450_017.nt.2 | 39635 | 39635.0 | Colon array | 432-491 |
| DEX0450_017.nt.3 | 39636 | 39636.0 | Colon array | 479-538 |
| DEX0450_017.nt.3 | 39631 | 39631.0 | Colon array | 518-577 |
| DEX0450_017.nt.3 | 39769 | 39769.0 | Colon array | 393-452 |
| DEX0450_017.nt.3 | 39635 | 39635.0 | Colon array | 519-578 |
| DEX0450_018.nt.1 | 31424 | 31424.0 | Colon array | 2191-2250 |
| DEX0450_018.nt.1 | 31425 | 31425.0 | Colon array | 2120-2179 |
| DEX0450_018.nt.2 | 31424 | 31424.0 | Colon array | 2191-2250 |
| DEX0450_018.nt.3 | 31425 | 31425.0 | Colon array | 2120-2179 |
| DEX0450_018.nt.3 | 31424 | 31424.0 | Colon array | 2191-2250 |
| DEX0450_018.nt.4 | 31425 | 31425.0 | Colon array | 506-565 |
| DEX0450_019.nt.1 | 35571 | 35571.0 | Colon array | 1385-1444 |
| DEX0450_019.nt.1 | 32748 | 32748.0 | Colon array | 752-811 |
| DEX0450_019.nt.1 | 33067 | 33067.0 | Colon array | 1441-1500 |
| DEX0450_019.nt.1 | 35570 | 35570.0 | Colon array | 1437-1496 |
| DEX0450_019.nt.1 | 33066 | 33066.0 | Colon array | 1531-1590 |
| DEX0450_019.nt.2 | 35571 | 35571.0 | Colon array | 1385-1444 |
| DEX0450_019.nt.2 | 33067 | 33067.0 | Colon array | 1441-1500 |
| DEX0450_019.nt.2 | 32748 | 32748.0 | Colon array | 752-811 |
| DEX0450_019.nt.2 | 33066 | 33066.0 | Colon array | 1531-1590 |
| DEX0450_019.nt.2 | 35570 | 35570.0 | Colon array | 1437-1496 |
| DEX0450_019.nt.3 | 32748 | 32748.0 | Colon array | 752-811 |
| DEX0450_019.nt.3 | 33067 | 33067.0 | Colon array | 1441-1500 |
| DEX0450_019.nt.3 | 33066 | 33066.0 | Colon array | 1531-1590 |
| DEX0450_019.nt.3 | 35571 | 35571.0 | Colon array | 1385-1444 |
| DEX0450_020.nt.1 | 32972 | 32972.0 | Colon array | 1059-1118 |
| DEX0450_020.nt.1 | 32991 | 32991.0 | Colon array | 1226-1285 |
| DEX0450_020.nt.1 | 32992 | 32992.0 | Colon array | 1557-1616 |
| DEX0450_020.nt.1 | 32990 | 32990.0 | Colon array | 1246-1305 |
| DEX0450_020.nt.1 | 32995 | 32995.0 | Colon array | 1100-1159 |
| DEX0450_020.nt.1 | 32994 | 32994.0 | Colon array | 1130-1189 |
| DEX0450_020.nt.1 | 35546 | 35546.0 | Colon array | 1557-1616 |
| DEX0450_020.nt.2 | 32991 | 32991.0 | Colon array | 1885-1944 |
| DEX0450_020.nt.2 | 32972 | 32972.0 | Colon array | 1718-1777 |
| DEX0450_020.nt.2 | 32992 | 32992.0 | Colon array | 2216-2275 |
| DEX0450_020.nt.2 | 32995 | 32995.0 | Colon array | 1759-1818 |
| DEX0450_020.nt.2 | 32990 | 32990.0 | Colon array | 1905-1964 |
| DEX0450_020.nt.3 | 32995 | 32995.0 | Colon array | 4462-4521 |
| DEX0450_020.nt.3 | 32992 | 32992.0 | Colon array | 4919-4978 |
| DEX0450_020.nt.3 | 32991 | 32991.0 | Colon array | 4588-4647 |
| DEX0450_020.nt.3 | 32990 | 32990.0 | Colon array | 4608-4667 |
| DEX0450_020.nt.3 | 35546 | 35546.0 | Colon array | 4919-4978 |
| DEX0450_020.nt.3 | 32972 | 32972.0 | Colon array | 4421-4480 |
| DEX0450_021.nt.1 | 10701 | 10701.0 | Colon array | 3600-3659 |
| DEX0450_021.nt.1 | 10744 | 10744.0 | Colon array | 4464-4523 |
| DEX0450_021.nt.1 | 10745 | 10745.0 | Colon array | 4424-4483 |
| DEX0450_021.nt.1 | 10700 | 10700.0 | Colon array | 3685-3744 |
| DEX0450_022.nt.1 | 12058 | 12058.0 | Colon array | 975-1034 |
| DEX0450_022.nt.1 | 12057 | 12057.0 | Colon array | 1271-1330 |
| DEX0450_023.nt.1 | 22060 | 22060.0 | Breast array | 1652-1711 |
| DEX0450_023.nt.1 | 8910 | 8910.0 | Colon array | 1898-1957 |
| DEX0450_023.nt.2 | 22060 | 22060.0 | Breast array | 776-835 |
| DEX0450_023.nt.3 | 8910 | 8910.0 | Colon array | 381-440 |
| DEX0450_024.nt.1 | 36564 | 36564.0 | Colon array | 315-374 |
| DEX0450_025.nt.1 | 37705 | 37705.0 | Colon array | 273-332 |
| DEX0450_025.nt.1 | 77759 | 77759.0 | Multi-Cancer array | 46-105 |
| DEX0450_025.nt.1 | 37706 | 37706.0 | Colon array | 233-292 |
| DEX0450_027.nt.1 | 35471 | 35471.0 | Colon array | 2662-2721 |
| DEX0450_027.nt.1 | 35470 | 35470.0 | Colon array | 2787-2846 |
| DEX0450_027.nt.2 | 35471 | 35471.0 | Colon array | 2708-2767 |
| DEX0450_028.nt.1 | 31539 | 31539.0 | Colon array | 715-774 |
| DEX0450_028.nt.1 | 31545 | 31545.0 | Colon array | 938-997 |
| DEX0450_029.nt.1 | 37947 | 37947.02 | Ovarian array | 1100-1159 |
| DEX0450_030.nt.1 | 8410 | 8410.0 | Colon array | 174-233 |
| DEX0450_030.nt.1 | 8411 | 8411.0 | Colon array | 144-203 |
| DEX0450_031.nt.1 | 957 | 957.0 | Lung array | 1843-1902 |
| DEX0450_031.nt.1 | 28423 | 28423.0 | Colon array | 284-343 |
| DEX0450_031.nt.1 | 956 | 956.0 | Multi-Cancer array | 280-339 |
| DEX0450_031.nt.1 | 17869 | 17869.0 | Breast array | 279-338 |
| DEX0450_031.nt.1 | 9880 | 9880.01 | Ovarian array | 284-343 |
| DEX0450_031.nt.1 | 31466 | 31466.0 | Breast array | 648-707 |
| DEX0450_031.nt.1 | 955 | 955.0 | Lung array | 285-344 |
| DEX0450_031.nt.1 | 38723 | 38723.01 | Prostate2 array | 285-344 |
| DEX0450_031.nt.1 | 5750 | 5750.0 | Lung array | 1882-1941 |
| DEX0450_031.nt.1 | 835 | 835.0 | Lung array | 638-697 |
| DEX0450_031.nt.1 | 21356 | 21356.0 | Colon array | 2168-2227 |
| DEX0450_031.nt.1 | 5254 | 5254.0 | Lung array | 2168-2227 |
| DEX0450_031.nt.1 | 836 | 836.0 | Lung array | 618-677 |
| DEX0450_031.nt.1 | 5749 | 5749.0 | Lung array | 1767-1826 |
| DEX0450_031.nt.1 | 953 | 953.0 | Lung array | 478-537 |
| DEX0450_031.nt.2 | 5749 | 5749.0 | Lung array | 442-501 |
| DEX0450_031.nt.2 | 5750 | 5750.0 | Lung array | 557-616 |
| DEX0450_031.nt.2 | 957 | 957.0 | Lung array | 518-577 |
| DEX0450_031.nt.2 | 5254 | 5254.0 | Lung array | 843-902 |
| DEX0450_031.nt.2 | 21356 | 21356.0 | Colon array | 843-902 |
| DEX0450_032.nt.1 | 35945 | 35945.03 | Prostate2 array | 851-910 |
| DEX0450_032.nt.1 | 15848 | 15848.0 | Breast array | 942-1001 |
| DEX0450_032.nt.1 | 35955 | 35955.02 | Prostate2 array | 942-1001 |
| DEX0450_032.nt.1 | 32036 | 32036.02 | Prostate1 array | 942-1001 |
| DEX0450_032.nt.1 | 19576 | 19576.0 | Breast array | 942-1001 |
| DEX0450_032.nt.1 | 16912 | 16912.0 | Breast array | 851-910 |
| DEX0450_032.nt.1 | 35907 | 35907.03 | Prostate2 array | 851-910 |
| DEX0450_032.nt.1 | 34888 | 34888.0 | Colon array | 965-1024 |
| DEX0450_032.nt.1 | 16908 | 16908.0 | Breast array | 942-1001 |
| DEX0450_032.nt.2 | 16912 | 16912.0 | Breast array | 5212-5271 |
| DEX0450_032.nt.2 | 16111 | 16111.0 | Breast array | 4379-4438 |
| DEX0450_032.nt.2 | 35897 | 35897.03 | Prostate2 array | 3910-3969 |
| DEX0450_032.nt.2 | 35959 | 35959.02 | Prostate2 array | 4379-4438 |
| DEX0450_032.nt.2 | 15320 | 15320.0 | Breast array | 3570-3629 |
| DEX0450_032.nt.2 | 31256 | 31256.03 | Prostate2 array | 3565-3624 |
| DEX0450_032.nt.2 | 35907 | 35907.03 | Prostate2 array | 5212-5271 |
| DEX0450_032.nt.2 | 15865 | 15865.0 | Breast array | 3565-3624 |
| DEX0450_032.nt.2 | 16908 | 16908.0 | Breast array | 5303-5362 |
| DEX0450_032.nt.2 | 15848 | 15848.0 | Breast array | 5303-5362 |
| DEX0450_032.nt.2 | 32036 | 32036.02 | Prostate1 array | 5303-5362 |
| DEX0450_032.nt.2 | 15317 | 15317.0 | Breast array | 5036-5095 |
| DEX0450_032.nt.2 | 15315 | 15315.0 | Breast array | 4823-4882 |
| DEX0450_032.nt.2 | 35955 | 35955.02 | Prostate2 array | 5303-5362 |
| DEX0450_032.nt.2 | 16910 | 16910.0 | Breast array | 4379-4438 |
| DEX0450_032.nt.2 | 35945 | 35945.03 | Prostate2 array | 5212-5271 |
| DEX0450_032.nt.2 | 32020 | 32020.02 | Prostate1 array | 1062-1121 |
| DEX0450_032.nt.2 | 35957 | 35957.03 | Prostate2 array | 4379-4438 |
| DEX0450_032.nt.2 | 15324 | 15324.0 | Breast array | 4113-4172 |
| DEX0450_032.nt.2 | 19576 | 19576.0 | Breast array | 5303-5362 |
| DEX0450_032.nt.2 | 35919 | 35919.02 | Prostate2 array | 4113-4172 |
| DEX0450_032.nt.2 | 34888 | 34888.0 | Colon array | 5326-5385 |
| DEX0450_032.nt.2 | 35905 | 35905.03 | Prostate2 array | 4833-4892 |
| DEX0450_032.nt.2 | 26953 | 26953.02 | Prostate1 array | 3763-3822 |
| DEX0450_032.nt.2 | 20237 | 20237.0 | Breast array | 1062-1121 |
| DEX0450_032.nt.2 | 31591 | 31591.0 | Breast array | 3572-3631 |
| DEX0450_032.nt.2 | 35951 | 35951.01 | Prostate2 array | 3574-3633 |
| DEX0450_032.nt.2 | 15830 | 15830.0 | Breast array | 3880-3939 |
| DEX0450_032.nt.2 | 15829 | 15829.0 | Breast array | 3910-3969 |
| DEX0450_032.nt.2 | 16906 | 16906.0 | Breast array | 3574-3633 |
| DEX0450_032.nt.2 | 31590 | 31590.0 | Breast array | 3763-3822 |
| DEX0450_032.nt.2 | 35901 | 35901.01 | Prostate2 array | 3570-3629 |
| DEX0450_032.nt.3 | 35919 | 35919.02 | Prostate2 array | 4897-4956 |
| DEX0450_032.nt.3 | 16111 | 16111.0 | Breast array | 5163-5222 |
| DEX0450_032.nt.3 | 31256 | 31256.03 | Prostate2 array | 4349-4408 |
| DEX0450_032.nt.3 | 15848 | 15848.0 | Breast array | 6087-6146 |
| DEX0450_032.nt.3 | 32036 | 32036.02 | Prostate1 array | 6087-6146 |
| DEX0450_032.nt.3 | 26953 | 26953.02 | Prostate1 array | 4547-4606 |
| DEX0450_032.nt.3 | 35955 | 35955.02 | Prostate2 array | 6087-6146 |
| DEX0450_032.nt.3 | 15315 | 15315.0 | Breast array | 5607-5666 |
| DEX0450_032.nt.3 | 35951 | 35951.01 | Prostate2 array | 4358-4417 |
| DEX0450_032.nt.3 | 15830 | 15830.0 | Breast array | 4664-4723 |
| DEX0450_032.nt.3 | 35901 | 35901.01 | Prostate2 array | 4354-4413 |
| DEX0450_032.nt.3 | 35897 | 35897.03 | Prostate2 array | 4694-4753 |
| DEX0450_032.nt.3 | 35957 | 35957.03 | Prostate2 array | 5163-5222 |
| DEX0450_032.nt.3 | 35945 | 35945.03 | Prostate2 array | 5996-6055 |
| DEX0450_032.nt.3 | 32020 | 32020.02 | Prostate1 array | 1062-1121 |
| DEX0450_032.nt.3 | 35959 | 35959.02 | Prostate2 array | 5163-5222 |
| DEX0450_032.nt.3 | 15324 | 15324.0 | Breast array | 4897-4956 |
| DEX0450_032.nt.3 | 19576 | 19576.0 | Breast array | 6087-6146 |
| DEX0450_032.nt.3 | 15320 | 15320.0 | Breast array | 4354-4413 |
| DEX0450_032.nt.3 | 16908 | 16908.0 | Breast array | 6087-6146 |
| DEX0450_032.nt.3 | 34888 | 34888.0 | Colon array | 6110-6169 |
| DEX0450_032.nt.3 | 15317 | 15317.0 | Breast array | 5820-5879 |
| DEX0450_032.nt.3 | 35905 | 35905.03 | Prostate2 array | 5617-5676 |
| DEX0450_032.nt.3 | 35907 | 35907.03 | Prostate2 array | 5996-6055 |
| DEX0450_032.nt.3 | 15865 | 15865.0 | Breast array | 4349-4408 |
| DEX0450_032.nt.3 | 20237 | 20237.0 | Breast array | 1062-1121 |
| DEX0450_032.nt.3 | 31591 | 31591.0 | Breast array | 4356-4415 |
| DEX0450_032.nt.3 | 15829 | 15829.0 | Breast array | 4694-4753 |
| DEX0450_032.nt.3 | 16910 | 16910.0 | Breast array | 5163-5222 |
| DEX0450_032.nt.3 | 16906 | 16906.0 | Breast array | 4358-4417 |
| DEX0450_032.nt.3 | 31590 | 31590.0 | Breast array | 4547-4606 |
| DEX0450_032.nt.3 | 16912 | 16912.0 | Breast array | 5996-6055 |
| DEX0450_032.nt.4 | 35897 | 35897.03 | Prostate2 array | 1668-1727 |
| DEX0450_032.nt.4 | 15320 | 15320.0 | Breast array | 1328-1387 |
| DEX0450_032.nt.4 | 16111 | 16111.0 | Breast array | 2137-2196 |
| DEX0450_032.nt.4 | 35959 | 35959.02 | Prostate2 array | 2137-2196 |
| DEX0450_032.nt.4 | 16908 | 16908.0 | Breast array | 3061-3120 |
| DEX0450_032.nt.4 | 31256 | 31256.03 | Prostate2 array | 1323-1382 |
| DEX0450_032.nt.4 | 15848 | 15848.0 | Breast array | 3061-3120 |
| DEX0450_032.nt.4 | 32036 | 32036.02 | Prostate1 array | 3061-3120 |
| DEX0450_032.nt.4 | 15865 | 15865.0 | Breast array | 1323-1382 |
| DEX0450_032.nt.4 | 35907 | 35907.03 | Prostate2 array | 2970-3029 |
| DEX0450_032.nt.4 | 15317 | 15317.0 | Breast array | 2794-2853 |
| DEX0450_032.nt.4 | 35955 | 35955.02 | Prostate2 array | 3061-3120 |
| DEX0450_032.nt.4 | 16910 | 16910.0 | Breast array | 2137-2196 |
| DEX0450_032.nt.4 | 15315 | 15315.0 | Breast array | 2581-2640 |
| DEX0450_032.nt.4 | 35945 | 35945.03 | Prostate2 array | 2970-3029 |
| DEX0450_032.nt.4 | 35957 | 35957.03 | Prostate2 array | 2137-2196 |
| DEX0450_032.nt.4 | 32020 | 32020.02 | Prostate1 array | 1062-1121 |
| DEX0450_032.nt.4 | 15324 | 15324.0 | Breast array | 1871-1930 |
| DEX0450_032.nt.4 | 35919 | 35919.02 | Prostate2 array | 1871-1930 |
| DEX0450_032.nt.4 | 19576 | 19576.0 | Breast array | 3061-3120 |
| DEX0450_032.nt.4 | 34888 | 34888.0 | Colon array | 3084-3143 |
| DEX0450_032.nt.4 | 35905 | 35905.03 | Prostate2 array | 2591-2650 |
| DEX0450_032.nt.4 | 20237 | 20237.0 | Breast array | 1062-1121 |
| DEX0450_032.nt.4 | 31591 | 31591.0 | Breast array | 1330-1389 |
| DEX0450_032.nt.4 | 26953 | 26953.02 | Prostate1 array | 1521-1580 |
| DEX0450_032.nt.4 | 15829 | 15829.0 | Breast array | 1668-1727 |
| DEX0450_032.nt.4 | 15830 | 15830.0 | Breast array | 1638-1697 |
| DEX0450_032.nt.4 | 31590 | 31590.0 | Breast array | 1521-1580 |
| DEX0450_032.nt.4 | 16906 | 16906.0 | Breast array | 1332-1391 |
| DEX0450_032.nt.4 | 35951 | 35951.01 | Prostate2 array | 1332-1391 |
| DEX0450_032.nt.4 | 35901 | 35901.01 | Prostate2 array | 1328-1387 |
| DEX0450_032.nt.5 | 35919 | 35919.02 | Prostate2 array | 4572-4631 |
| DEX0450_032.nt.5 | 16111 | 16111.0 | Breast array | 4838-4897 |
| DEX0450_032.nt.5 | 20237 | 20237.0 | Breast array | 1062-1121 |
| DEX0450_032.nt.5 | 31256 | 31256.03 | Prostate2 array | 4024-4083 |
| DEX0450_032.nt.5 | 35901 | 35901.01 | Prostate2 array | 4029-4088 |
| DEX0450_032.nt.5 | 35957 | 35957.03 | Prostate2 array | 4838-4897 |
| DEX0450_032.nt.5 | 15848 | 15848.0 | Breast array | 5762-5821 |
| DEX0450_032.nt.5 | 15830 | 15830.0 | Breast array | 4339-4398 |
| DEX0450_032.nt.5 | 15315 | 15315.0 | Breast array | 5282-5341 |
| DEX0450_032.nt.5 | 26953 | 26953.02 | Prostate1 array | 4222-4281 |
| DEX0450_032.nt.5 | 35955 | 35955.02 | Prostate2 array | 5762-5821 |
| DEX0450_032.nt.5 | 35951 | 35951.01 | Prostate2 array | 4033-4092 |
| DEX0450_032.nt.5 | 32036 | 32036.02 | Prostate1 array | 5762-5821 |
| DEX0450_032.nt.5 | 15324 | 15324.0 | Breast array | 4572-4631 |
| DEX0450_032.nt.5 | 19576 | 19576.0 | Breast array | 5762-5821 |
| DEX0450_032.nt.5 | 34888 | 34888.0 | Colon array | 5785-5844 |
| DEX0450_032.nt.5 | 15320 | 15320.0 | Breast array | 4029-4088 |
| DEX0450_032.nt.5 | 32020 | 32020.02 | Prostate1 array | 1062-1121 |
| DEX0450_032.nt.5 | 35959 | 35959.02 | Prostate2 array | 4838-4897 |
| DEX0450_032.nt.5 | 16908 | 16908.0 | Breast array | 5762-5821 |
| DEX0450_032.nt.5 | 35945 | 35945.03 | Prostate2 array | 5671-5730 |
| DEX0450_032.nt.5 | 35897 | 35897.03 | Prostate2 array | 4369-4428 |
| DEX0450_032.nt.5 | 31590 | 31590.0 | Breast array | 4222-4281 |
| DEX0450_032.nt.5 | 15865 | 15865.0 | Breast array | 4024-4083 |
| DEX0450_032.nt.5 | 15317 | 15317.0 | Breast array | 5495-5554 |
| DEX0450_032.nt.5 | 31591 | 31591.0 | Breast array | 4031-4090 |
| DEX0450_032.nt.5 | 16910 | 16910.0 | Breast array | 4838-4897 |
| DEX0450_032.nt.5 | 35905 | 35905.03 | Prostate2 array | 5292-5351 |
| DEX0450_032.nt.5 | 16912 | 16912.0 | Breast array | 5671-5730 |
| DEX0450_032.nt.5 | 16906 | 16906.0 | Breast array | 4033-4092 |
| DEX0450_032.nt.5 | 15829 | 15829.0 | Breast array | 4369-4428 |
| DEX0450_032.nt.5 | 35907 | 35907.03 | Prostate2 array | 5671-5730 |
| DEX0450_032.nt.6 | 16910 | 16910.0 | Breast array | 4838-4897 |
| DEX0450_032.nt.6 | 31256 | 31256.03 | Prostate2 array | 4024-4083 |
| DEX0450_032.nt.6 | 16908 | 16908.0 | Breast array | 5582-5641 |
| DEX0450_032.nt.6 | 15324 | 15324.0 | Breast array | 4572-4631 |
| DEX0450_032.nt.6 | 35901 | 35901.01 | Prostate2 array | 4029-4088 |
| DEX0450_032.nt.6 | 15315 | 15315.0 | Breast array | 5282-5341 |
| DEX0450_032.nt.6 | 35957 | 35957.03 | Prostate2 array | 4838-4897 |
| DEX0450_032.nt.6 | 16912 | 16912.0 | Breast array | 5491-5550 |
| DEX0450_032.nt.6 | 16111 | 16111.0 | Breast array | 4838-4897 |
| DEX0450_032.nt.6 | 15865 | 15865.0 | Breast array | 4024-4083 |
| DEX0450_032.nt.6 | 34888 | 34888.0 | Colon array | 5605-5664 |
| DEX0450_032.nt.6 | 15320 | 15320.0 | Breast array | 4029-4088 |
| DEX0450_032.nt.6 | 35919 | 35919.02 | Prostate2 array | 4572-4631 |
| DEX0450_032.nt.6 | 26953 | 26953.02 | Prostate1 array | 4222-4281 |
| DEX0450_032.nt.6 | 20237 | 20237.0 | Breast array | 1062-1121 |
| DEX0450_032.nt.6 | 35897 | 35897.03 | Prostate2 array | 4369-4428 |
| DEX0450_032.nt.6 | 35945 | 35945.03 | Prostate2 array | 5491-5550 |
| DEX0450_032.nt.6 | 15829 | 15829.0 | Breast array | 4369-4428 |
| DEX0450_032.nt.6 | 32036 | 32036.02 | Prostate1 array | 5582-5641 |
| DEX0450_032.nt.6 | 35955 | 35955.02 | Prostate2 array | 5582-5641 |
| DEX0450_032.nt.6 | 32020 | 32020.02 | Prostate1 array | 1062-1121 |
| DEX0450_032.nt.6 | 15830 | 15830.0 | Breast array | 4339-4398 |
| DEX0450_032.nt.6 | 35959 | 35959.02 | Prostate2 array | 4838-4897 |
| DEX0450_032.nt.6 | 35905 | 35905.03 | Prostate2 array | 5292-5351 |
| DEX0450_032.nt.6 | 35951 | 35951.01 | Prostate2 array | 4033-4092 |
| DEX0450_032.nt.6 | 19576 | 19576.0 | Breast array | 5582-5641 |
| DEX0450_032.nt.6 | 15848 | 15848.0 | Breast array | 5582-5641 |
| DEX0450_032.nt.6 | 31591 | 31591.0 | Breast array | 4031-4090 |
| DEX0450_032.nt.6 | 31590 | 31590.0 | Breast array | 4222-4281 |
| DEX0450_032.nt.6 | 16906 | 16906.0 | Breast array | 4033-4092 |
| DEX0450_032.nt.6 | 35907 | 35907.03 | Prostate2 array | 5491-5550 |
| DEX0450_032.nt.7 | 32036 | 32036.02 | Prostate1 array | 5278-5337 |
| DEX0450_032.nt.7 | 16912 | 16912.0 | Breast array | 5187-5246 |
| DEX0450_032.nt.7 | 31591 | 31591.0 | Breast array | 4031-4090 |
| DEX0450_032.nt.7 | 19576 | 19576.0 | Breast array | 5278-5337 |
| DEX0450_032.nt.7 | 35919 | 35919.02 | Prostate2 array | 4323-4382 |
| DEX0450_032.nt.7 | 15865 | 15865.0 | Breast array | 4024-4083 |
| DEX0450_032.nt.7 | 35945 | 35945.03 | Prostate2 array | 5187-5246 |
| DEX0450_032.nt.7 | 35907 | 35907.03 | Prostate2 array | 5187-5246 |
| DEX0450_032.nt.7 | 31590 | 31590.0 | Breast array | 4222-4281 |
| DEX0450_032.nt.7 | 15315 | 15315.0 | Breast array | 4798-4857 |
| DEX0450_032.nt.7 | 15848 | 15848.0 | Breast array | 5278-5337 |
| DEX0450_032.nt.7 | 35955 | 35955.02 | Prostate2 array | 5278-5337 |
| DEX0450_032.nt.7 | 26953 | 26953.02 | Prostate1 array | 4222-4281 |
| DEX0450_032.nt.7 | 15317 | 15317.0 | Breast array | 5011-5070 |
| DEX0450_032.nt.7 | 15320 | 15320.0 | Breast array | 4029-4088 |
| DEX0450_032.nt.7 | 32020 | 32020.02 | Prostate1 array | 1062-1121 |
| DEX0450_032.nt.7 | 20237 | 20237.0 | Breast array | 1062-1121 |
| DEX0450_032.nt.7 | 15324 | 15324.0 | Breast array | 4323-4382 |
| DEX0450_032.nt.7 | 31256 | 31256.03 | Prostate2 array | 4024-4083 |
| DEX0450_032.nt.7 | 35905 | 35905.03 | Prostate2 array | 4808-4867 |
| DEX0450_032.nt.7 | 35901 | 35901.01 | Prostate2 array | 4029-4088 |
| DEX0450_032.nt.7 | 16908 | 16908.0 | Breast array | 5278-5337 |
| DEX0450_032.nt.7 | 35951 | 35951.01 | Prostate2 array | 4033-4092 |
| DEX0450_032.nt.7 | 34888 | 34888.0 | Colon array | 5301-5360 |
| DEX0450_032.nt.7 | 16906 | 16906.0 | Breast array | 4033-4092 |
| DEX0450_033.nt.1 | 1234 | 1234.0 | Lung array | 528-587 |
| DEX0450_033.nt.1 | 18480 | 18480.02 | Ovarian array | 528-587 |
| DEX0450_033.nt.1 | 30532 | 30532.0 | Colon array | 526-585 |
| DEX0450_033.nt.2 | 34642 | 34642.0 | Colon array | 1335-1394 |
| DEX0450_033.nt.2 | 30532 | 30532.0 | Colon array | 525-584 |
| DEX0450_033.nt.2 | 1234 | 1234.0 | Lung array | 527-586 |
| DEX0450_033.nt.2 | 24954 | 24954.02 | Prostate1 array | 1306-1365 |
| DEX0450_033.nt.2 | 34643 | 34643.0 | Colon array | 1295-1354 |
| DEX0450_033.nt.2 | 18480 | 18480.02 | Ovarian array | 527-586 |
| DEX0450_033.nt.2 | 5421 | 5421.0 | Lung array | 1233-1292 |
| DEX0450_033.nt.2 | 28019 | 28019.02 | Prostate1 array | 1335-1394 |
| DEX0450_034.nt.1 | 37498 | 37498.0 | Colon array | 409-468 |
| DEX0450_035.nt.1 | 20153 | 20153.0 | Colon array | 1276-1335 |
| DEX0450_035.nt.1 | 20154 | 20154.0 | Colon array | 1230-1289 |
| DEX0450_036.nt.1 | 5961 | 5961.0 | Lung array | 1321-1380 |
| DEX0450_036.nt.1 | 37616 | 37616.0 | Colon array | 1951-2010 |
| DEX0450_036.nt.1 | 37635 | 37635.0 | Colon array | 1975-2034 |
| DEX0450_036.nt.1 | 37615 | 37615.0 | Colon array | 1991-2050 |
| DEX0450_037.nt.1 | 1022 | 1022.0 | Lung array | 480-539 |
| DEX0450_037.nt.1 | 12335 | 12335.02 | Ovarian array | 374-433 |
| DEX0450_037.nt.1 | 33741 | 33741.0 | Colon array | 408-467 |
| DEX0450_037.nt.1 | 29069 | 29069.01 | Prostate2 array | 374-433 |
| DEX0450_037.nt.1 | 1023 | 1023.0 | Lung array | 425-484 |
| DEX0450_037.nt.1 | 36689 | 36689.01 | Prostate1 array | 547-606 |
| DEX0450_037.nt.1 | 29065 | 29065.03 | Prostate2 array | 480-539 |
| DEX0450_038.nt.1 | 38976 | 38976.0 | Colon array | 457-516 |
| DEX0450_038.nt.1 | 38975 | 38975.0 | Colon array | 483-542 |
| DEX0450_039.nt.1 | 38502 | 38502.0 | Colon array | 457-516 |
| DEX0450_039.nt.1 | 38501 | 38501.0 | Colon array | 558-617 |
| DEX0450_039.nt.2 | 38499 | 38499.0 | Colon array | 1002-1061 |
| DEX0450_039.nt.2 | 36599 | 36599.0 | Colon array | 779-838 |
| DEX0450_039.nt.2 | 38501 | 38501.0 | Colon array | 559-618 |
| DEX0450_039.nt.2 | 38502 | 38502.0 | Colon array | 458-517 |
| DEX0450_039.nt.2 | 38509 | 38509.0 | Colon array | 996-1055 |
| DEX0450_039.nt.2 | 38510 | 38510.0 | Colon array | 799-858 |
| DEX0450_039.nt.2 | 38428 | 38428.0 | Colon array | 1001-1060 |
| DEX0450_039.nt.3 | 38499 | 38499.0 | Colon array | 878-937 |
| DEX0450_039.nt.3 | 38510 | 38510.0 | Colon array | 675-734 |
| DEX0450_039.nt.3 | 36599 | 36599.0 | Colon array | 655-714 |
| DEX0450_039.nt.3 | 38509 | 38509.0 | Colon array | 872-931 |
| DEX0450_039.nt.3 | 38428 | 38428.0 | Colon array | 877-936 |
| DEX0450_039.nt.3 | 38501 | 38501.0 | Colon array | 435-494 |
| DEX0450_039.nt.4 | 38510 | 38510.0 | Colon array | 1091-1150 |
| DEX0450_039.nt.4 | 36599 | 36599.0 | Colon array | 1071-1130 |
| DEX0450_039.nt.4 | 38501 | 38501.0 | Colon array | 793-852 |
| DEX0450_039.nt.4 | 38502 | 38502.0 | Colon array | 692-751 |
| DEX0450_039.nt.4 | 38428 | 38428.0 | Colon array | 1293-1352 |
| DEX0450_039.nt.4 | 38509 | 38509.0 | Colon array | 1288-1347 |
| DEX0450_039.nt.4 | 38499 | 38499.0 | Colon array | 1294-1353 |
| DEX0450_039.nt.5 | 38501 | 38501.0 | Colon array | 793-852 |
| DEX0450_039.nt.5 | 38502 | 38502.0 | Colon array | 692-751 |
| DEX0450_039.nt.6 | 38501 | 38501.0 | Colon array | 793-852 |
| DEX0450_040.nt.1 | 39582 | 39582.0 | Colon array | 545-604 |
| DEX0450_040.nt.1 | 35521 | 35521.0 | Colon array | 498-557 |
| DEX0450_040.nt.1 | 39581 | 39581.0 | Colon array | 655-714 |
| DEX0450_040.nt.1 | 35520 | 35520.0 | Colon array | 655-714 |
| DEX0450_041.nt.1 | 36756 | 36756.0 | Colon array | 110-169 |
| DEX0450_041.nt.1 | 33072 | 33072.0 | Colon array | 470-529 |
| DEX0450_041.nt.1 | 33075 | 33075.0 | Colon array | 979-1038 |
| DEX0450_041.nt.1 | 29313 | 29313.03 | Prostate2 array | 1076-1135 |
| DEX0450_041.nt.1 | 36755 | 36755.0 | Colon array | 130-189 |
| DEX0450_041.nt.1 | 37290 | 37290.0 | Colon array | 1167-1226 |
| DEX0450_041.nt.1 | 33074 | 33074.0 | Colon array | 1076-1135 |
| DEX0450_041.nt.1 | 29311 | 29311.03 | Prostate2 array | 470-529 |
| DEX0450_042.nt.1 | 33118 | 33118.0 | Colon array | 3762-3821 |
| DEX0450_042.nt.1 | 40737 | 40737.0 | Colon array | 2151-2210 |
| DEX0450_042.nt.1 | 34009 | 34009.0 | Colon array | 3065-3124 |
| DEX0450_042.nt.1 | 33119 | 33119.0 | Colon array | 3722-3781 |
| DEX0450_042.nt.2 | 33118 | 33118.0 | Colon array | 2347-2406 |
| DEX0450_042.nt.2 | 34009 | 34009.0 | Colon array | 1650-1709 |
| DEX0450_042.nt.2 | 33119 | 33119.0 | Colon array | 2307-2366 |
| DEX0450_042.nt.2 | 40737 | 40737.0 | Colon array | 736-795 |
| DEX0450_043.nt.1 | 35881 | 35881.0 | Colon array | 2681-2740 |
| DEX0450_043.nt.1 | 36670 | 36670.0 | Colon array | 6794-6853 |
| DEX0450_043.nt.1 | 35882 | 35882.0 | Colon array | 2641-2700 |
| DEX0450_043.nt.1 | 36669 | 36669.0 | Colon array | 6919-6978 |
| DEX0450_044.nt.1 | 24211 | 24211.0 | Breast array | 173-232 |
| DEX0450_044.nt.1 | 9110 | 9110.0 | Colon array | 206-265 |
| DEX0450_044.nt.1 | 24210 | 24210.0 | Breast array | 206-265 |
| DEX0450_044.nt.2 | 9110 | 9110.0 | Colon array | 1624-1683 |
| DEX0450_044.nt.2 | 24211 | 24211.0 | Breast array | 1591-1650 |
| DEX0450_044.nt.2 | 24210 | 24210.0 | Breast array | 1624-1683 |
| DEX0450_044.nt.3 | 9110 | 9110.0 | Colon array | 794-853 |
| DEX0450_044.nt.3 | 24210 | 24210.0 | Breast array | 794-853 |
| DEX0450_044.nt.3 | 24211 | 24211.0 | Breast array | 761-820 |
| DEX0450_045.nt.1 | 5599 | 5599.0 | Lung array | 873-932 |
| DEX0450_045.nt.1 | 19854 | 19854.0 | Breast array | 785-844 |
| DEX0450_045.nt.1 | 13784 | 13784.0 | Colon array | 765-824 |
| DEX0450_045.nt.1 | 19853 | 19853.0 | Breast array | 805-864 |
| DEX0450_045.nt.1 | 13783 | 13783.0 | Colon array | 805-864 |
| DEX0450_046.nt.1 | 10297 | 10297.0 | Colon array | 353-412 |
| DEX0450_047.nt.1 | 38789 | 38789.0 | Colon array | 1517-1576 |
| DEX0450_047.nt.1 | 30511 | 30511.0 | Colon array | 611-670 |
| DEX0450_047.nt.1 | 39412 | 39412.0 | Colon array | 1515-1574 |
| DEX0450_048.nt.1 | 41177 | 41177.0 | Colon array | 549-608 |
| DEX0450_048.nt.1 | 41178 | 41178.0 | Colon array | 519-578 |
| DEX0450_049.nt.1 | 31424 | 31424.0 | Colon array | 603-662 |
| DEX0450_049.nt.1 | 31425 | 31425.0 | Colon array | 532-591 |
| DEX0450_050.nt.1 | 9398 | 9398.0 | Colon array | 808-867 |
| DEX0450_050.nt.1 | 9399 | 9399.0 | Colon array | 764-823 |
| DEX0450_052.nt.1 | 37943 | 37943.0 | Colon array | 522-581 |
| DEX0450_052.nt.1 | 37944 | 37944.0 | Colon array | 402-461 |
| DEX0450_053.nt.1 | 9398 | 9398.0 | Colon array | 809-868 |
| DEX0450_053.nt.1 | 9399 | 9399.0 | Colon array | 765-824 |
| DEX0450_053.nt.1 | 31645 | 31645.0 | Breast array | 1875-1934 |
| DEX0450_053.nt.1 | 31644 | 31644.0 | Breast array | 1945-2004 |

### Example 2b

### Relative Quantitation of Gene Expression

[0486] Real-Time quantitative PCR with fluorescent Taqman® probes is a quantitation detection system utilizing the 5′-3′ nuclease activity of Taq DNA polymerase. The method uses an internal fluorescent oligonucleotide probe (Taqman®) labeled with a 5′ reporter dye and a downstream, 3′ quencher dye. During PCR, the 5′-3′ nuclease activity of Taq DNA polymerase releases the reporter, whose fluorescence can then be detected by the laser detector of the Model 7700 Sequence Detection System (PE Applied Biosystems, Foster City, Calif., USA). Amplification of an endogenous control is used to standardize the amount of sample RNA added to the reaction and normalize for Reverse Transcriptase (RT) efficiency. Either cyclophilin, glyceraldehyde-3-phosphate dehydrogenase (GAPDH), ATPase, or 18S ribosomal RNA (rRNA) is used as this endogenous control. To calculate relative quantitation between all the samples studied, the target RNA levels for one sample were used as the basis for comparative results (calibrator). Quantitation relative to the “calibrator” can be obtained using the comparative method (User Bulletin #2: ABI PRISM 7700 Sequence Detection System).

[0487] The tissue distribution and the level of the target gene are evaluated for every sample in normal and cancer tissues. Total RNA is extracted from normal tissues, cancer tissues, and from cancers and the corresponding matched adjacent tissues. Subsequently, first strand cDNA is prepared with reverse transcriptase and the polymerase chain reaction is done using primers and Taqman® probes specific to each target gene. The results are analyzed using the ABI PRISM 7700 Sequence Detector. The absolute numbers are relative levels of expression of the target gene in a particular tissue compared to the calibrator tissue.

[0488] One of ordinary skill can design appropriate primers. The relative levels of expression of the CSNA versus normal tissues and other cancer tissues can then be determined. All the values are compared to the calibrator. Normal RNA samples are commercially available pools, originated by pooling samples of a particular tissue from different individuals.

[0489] The relative levels of expression of the CSNA in pairs of matched samples may also be determined. A matched pair is formed by mRNA from the cancer sample for a particular tissue and mRNA from the normal adjacent sample for that same tissue from the same individual. All the values are compared to the calibrator.

[0490] In the analysis of matching samples, the CSNAs show a high degree of tissue specificity for the tissue of interest. These results confirm the tissue specificity results obtained with normal pooled samples. Further, the level of mRNA expression in cancer samples and the isogenic normal adjacent tissue from the same individual are compared. This comparison provides an indication of specificity for the cancer state (e.g. higher levels of mRNA expression in the cancer sample compared to the normal adjacent).

[0491] Informaton on the samples tested in the QPCR experiments below include the Sample ID (Smpl ID), Tissue, Tissue Type (Tiss Type), Diagnosis (DIAG), Disease Detail, and Stage or Grade (STG or GRD) in following table.

| Sample | | TISS | | | |
|---|---|---|---|---|---|
| ID | Tissue | TYPE | DIAG | DISEASE DETAIL | STG or GRD |
| AS12 | Colon | CAN | | T | StageB |
| AS12 | Colon | NAT | | NL | |
| AS46 | Colon | CAN | | malignant | T3N1MX |
| AS46 | Colon | NAT | | NAT | |
| B34 | Colon | CAN | Adenocarcinoma | | |
| B34 | Colon | NAT | | NAT | |
| C9XR | Colon | CAN | | Rectum Cancer | Stage D |
| C9XR | Colon | NAT | | NAT | |
| CM67 | Colon | CAN | Adenocarcinoma | Adenocarcinoma | Stage II |
| | | | | of cecum, | |
| | | | | Moderately | |
| | | | | differentiated | |
| CM67 | Colon | NAT | | NAT | |
| TX89 | Colon | CAN | Adenocarcinoma | Adenocarcinoma | Stave IV |
| | | | | of Transverse | |
| | | | | Colon | |
| TX89 | Colon | NAT | | NAT | |
| AS43 | Colon | CAN | Adenocarcinoma | malignant | |
| AS43 | Colon | NAT | Adenocarcinoma | NAT | |
| AS98 | Colon | CAN | Adenocarcinoma | Moderately to | Duke's C |
| | | | | poorly | |
| | | | | differentiated | |
| | | | | adenocarcinoma | |
| AS98 | Colon | NAT | | NAT | |
| RS53 | Colon | CAN | Adenocarcinoma | moderately | |
| | | | | differentiated | |
| | | | | adenocarcinoma | |
| RS53 | Colon | NAT | Adenocarcinoma | NAT | |
| RC01 | Colon | CAN | Cancer | | Stage IV |
| RC01 | Colon | NAT | | NAT | |
| SG27 | Colon | CAN | | malig | Stage B |
| SG27 | Colon | NAT | | NAT | |
| DC19 | Colon | CAN | | T | Stage B |
| DC19 | Colon | NAT | | NL | |
| 401C | Colon | CAN | Adenocarcinoma | Adenocarcinoma | Stage III |
| | | | | of ascending | |
| | | | | colon and cecum | |
| 401C | Colon | NAT | | NAT | |
| CM12 | Colon | CAN | | T | Stage D |
| CM12 | Colon | NAT | Adenocarcinoma | Nat | |
| TX01 | Colon | CAN | Adenocarcinoma | Moderately | Stage II; |
| | | | | differentiated | T3NoMo |
| | | | | adenocarcinoma | |
| | | | | of cecum | |
| TX01 | Colon | NAT | | NAT | |
| DC22 | Colon | CAN | | Cancer | |
| DC22 | Colon | NAT | | NAT | |
| 030B | Urinary | CAN | Carcinoma | invasive | Stage |
| | Bladder | | | Carcinoma, poorly | III, Grade 3 |
| | | | | differentiated | |
| 030B | Urinary | NAT | | NAT | |
| | Bladder | | | | |
| TR17 | Urinary | CAN | Carcinoma | transitional | StageII/Grade |
| | Bladder | | | cell carcinoma | III |
| TR17 | Urinary | NAT | | NAT | |
| | Bladder | | | | |
| 520B | Urinary | CAN | Sarcomatoid | Sarcomatoid | |
| | Bladder | | transitional | transitional | |
| | | | cell carcinoma | cell carcinoma | |
| 520B | Urinary | NAT | | NAT | |
| | Bladder | | | | |
| KS52 | Cervix | CAN | Squamous cell | Keratinizing | IIIB, well |
| | | | carcinoma | Squamous cell | diff. G1; |
| | | | | Carcinoma | T3bNxM0 |
| KS52 | Cervix | NAT | | NAT | |
| NK23 | Cervix | CAN | | Nonkeratinizing | FIGO IIIB, |
| | | | | Large Cell | undiff. G4; |
| | | | | | T3bNxM0 |
| NK23 | Cervix | NAT | | NAT | |
| NKS54 | Cervix | CAN | Squamous cell | Nonkeratinizing | IIB, mod |
| | | | carcinoma | Squamous Cell | diff. G2; |
| | | | | Carcinoma | T2bNxM0 |
| NKS54 | Cervix | NAT | | NAT | |
| NKS55 | Cervix | CAN | Squamous cell | Nonkeratinizing | IIIB, Mod |
| | | | carcinoma | Squamous Cell | diff. G2; |
| | | | | Carcinoma | T3bNxM0 |
| NKS55 | Cervix | NAT | | NAT | |
| NKS81 | Cervix | CAN | Squamous cell | large cell | IIB |
| | | | carcinoma | nonkeratinizing | |
| | | | | sq carc, IIB, | |
| | | | | moderately diff | |
| NKS81 | Cervix | NAT | | NAT | |
| NKS25 | Cervix | CAN | | | |
| NKS25 | Cervix | NAT | | NAT | |
| NKS18 | Cervix | CAN | Squamous cell | Nonkeratinizing | GII |
| | | | carcinoma | squamous cell | |
| | | | | carcinoma | |
| NKS18 | Cervix | NAT | | NAT | |
| 10479 | Endometrium | CAN | | malignant mixed | T?, Nx, M1 |
| | | | | mullerian tumor | |
| 10479 | Endometrium | NAT | | NAT | |
| 28XA | Endometrium | CAN | Endometrial | malignant | II/III |
| | | | adenocarcinoma | | |
| 28XA | Endometrium | NAT | | NAT | II/III |
| 8XA | Endometrium | CAN | mod. diff, | | |
| | | | invasive, | | |
| | | | squamous | | |
| | | | differentiation, | | |
| | | | FIGO-II | | |
| 8XA | Endometrium | NAT | | NAT | |
| 106XD | Kidney | CAN | Renal cell | renal cell | 3 |
| | | | carcinoma, | carcinoma, clear | |
| | | | | cell, localized | |
| 106XD | Kidney | NAT | | NL | |
| 107XD | Kidney | CAN | Renal cell | renal cell | G III |
| | | | carcinoma | carcinoma, clear | |
| | | | | cell, with | |
| | | | | metastatic | |
| 107XD | Kidney | NAT | | NL | |
| 109XD | Kidney | CAN | | Malignant | G III |
| 109XD | Kidney | NAT | | NL | |
| 10XD | Kidney | CAN | Renal cell | renal cell | 3 |
| | | | carcinoma | carcinoma, clear | |
| | | | | cell, localized, | |
| | | | | grade 2-3 | |
| 10XD | Kidney | NAT | | NL | |
| 22K | Kidney | CAN | Renal cell | Renal cell | G2, Mod. |
| | | | carcinoma | carcinoma | Diff. |
| 22K | Kidney | NAT | | NAT | |
| 12XD | Kidney | CAN | Renal cell | Left renal cell | |
| | | | carcinoma | carcinoma | |
| 12XD | Kidney | NAT | | NAT | |
| 15XA | Liver | CAN | | Sarcoma, Retroperitoneal | Grade-2 |
| | | | | Tumor | |
| 15XA | Liver | NAT | | CA | St. I, G4 |
| 174L | Liver | CAN | Hepatocellular | Moderate to well | |
| | | | carcinoma | differentiated | |
| | | | | hepatocellular | |
| | | | | carcinoma | |
| 174L | Liver | NAT | Hepatocellular | NAT | |
| | | | carcinoma | | |
| 187L | Liver | CAN | Adenocarcinoma | Metastatic | Liver |
| | | | | Adenocarcinoma | (Gallbladder) |
| 187L | Liver | NAT | | NAT | |
| 205L | Lung | CAN | Adenocarcinoma | poorly | T2, N1, Mx |
| | | | | differentiated | |
| | | | | adenocarcinoma | |
| 205L | Lung | NAT | | NAT | |
| 315L | Lung | CAN | Squamous cell | | |
| | | | carcinoma | | |
| 315L | Lung | NAT | Adenocarcinoma | NAT | |
| 507L | Lung | CAN | Bronchioloalveolar | bronchioalveolar | Stage IB, |
| | | | carcinoma | carcinoma | G1, well |
| | | | | | diff. |
| 507L | Lung | NAT | | NAT | |
| 528L | Lung | CAN | Adenocarcinoma | Adenocarcinoma | St. IV, T2N0M1, |
| | | | | | infiltrating |
| | | | | | poorly |
| | | | | | diff. |
| 528L | Lung | NAT | | NAT | |
| 8837L | Lung | CAN | Squamous cell | Squamous cell | T2, N0, M0 |
| | | | carcinoma | carcinoma | |
| 8837L | Lung | NAT | | NAT | |
| AC11 | Lung | CAN | Adenocarcinoma | poorly | T2, N2, M1 |
| | | | | differentiated | |
| | | | | adenocarcinoma | |
| AC11 | Lung | NAT | | NAT | |
| AC39 | Lung | CAN | Adenocarcinoma | intermediate | T2, N2, Mx |
| | | | | grade | |
| | | | | adnocarcinoma | |
| AC39 | Lung | NAT | | NAT | |
| SQ80 | Lung | CAN | Squamous cell | poorly | T1, N1, M0 |
| | | | carcinoma | differentiated | |
| | | | | squamous cell | |
| | | | | carcinoma | |
| SQ80 | Lung | NAT | | NAT | |
| SQ81 | Lung | CAN | Squamous cell | poorly | T3, N1, Mx |
| | | | carcinoma | differentiated | |
| | | | | squamous | |
| | | | | carcinoma | |
| SQ81 | Lung | NAT | | NAT | |
| 19DN | Mammary | CAN | Invasive | Invasive ductal | G3, Stage |
| | | | ductal | carcinoma | IIA; T2N0M0 |
| | | | carcinoma | | |
| 19DN | Mammary | NAT | | NAT | |
| 42DN | Mammary | CAN | Invasive | Invasive Ductal | T3aN1M0 |
| | | | ductal | Carcinoma | IIIA, G3 |
| | | | carcinoma | | |
| 42DN | Mammary | NAT | | NAT | |
| 517 | Mammary | CAN | Infiltrating | Infiltrating | St. IIA, G3 |
| | | | ductal | ductal carcinoma | |
| | | | carcinoma | | |
| 517 | Mammary | NAT | | NAT | |
| 781M | Mammary | CAN | Invasive | | Architectural |
| | | | ductal | | grade- |
| | | | carcinoma | | 3/3, Nuclear |
| | | | | | grade-3/3 |
| 781M | Mammary | NAT | | NAT | |
| 869M | Mammary | CAN | Invasive | Invasive | Stage IIA |
| | | | carcinoma | Carcinoma | G1; T2NoMo |
| 869M | Mammary | NAT | | NAT | |
| 976M | Mammary | CAN | Invasive | Invasive Ductal | T2N1M0 |
| | | | ductal | Carcinoma | (Stage 2B |
| | | | carcinoma | | Grade 2-3) |
| 976M | Mammary | NAT | | NAT | |
| S570 | Mammary | CAN | Carcinoma | Carcinoma | Stage |
| | | | | | IIA; T1N1Mo |
| S570 | Mammary | NAT | | NAT | |
| S699 | Mammary | CAN | Invasive | Invasive Lobular | Stage IIB |
| | | | lobular | Carcinoma | G1; T2N1Mo |
| | | | carcinoma | | |
| S699 | Mammary | NAT | | NAT | |
| S997 | Mammary | CAN | Invasive | Invasive Ductal | Stage IIB |
| | | | ductal | Carcinoma | G3; T2N1Mo |
| | | | carcinoma | | |
| S997 | Mammary | NAT | | NAT | |
| G021 | Ovary | CAN | Carcinoma | St. IIIC, poorly | Stage- |
| | | | | diff. | IIIC, |
| | | | | | poorly |
| | | | | | diff. |
| G021 | Ovary | NAT | | NAT | |
| 1005O | Ovary | CAN | | papillary serous | 3 |
| | | | | and endometrioid | |
| | | | | ovarian | |
| | | | | carcinoma, | |
| | | | | concurrent | |
| | | | | metastatic | |
| | | | | breast cancer | |
| 1040O | Ovary | CAN | | papillary serous | |
| | | | | adeno, | |
| | | | | metastatic | |
| 105O | Ovary | CAN | | Papillary Serous | Stage IC |
| | | | | Carcinoma with | G0; T1cN0M0 |
| | | | | Focal Mucinous | |
| | | | | Differentiation | |
| 130X | Ovary | CAN | | Ovarian cancer | |
| 718O | Ovary | CAN | Adenocarcinoma | malignant tumor | IIIC |
| A1B | Ovary | CAN | Adenocarcinoma | CA | |
| 123O | Ovary | NRM | | Normal | |
| 18GA | Ovary | NRM | | NL | |
| 206I | Ovary | NRM | | NL | |
| 337O | Ovary | NRM | | Normal | |
| 40G | Ovary | NRM | | NL | |
| 515O | Ovary | NRM | | Normal | |
| C004 | Ovary | NRM | | NL | |
| C177 | Ovary | NRM | | several fluid | |
| | | | | filled cysts | |
| 451O | Ovary | NRM | | Normal Tissue | |
| 718O | Ovary | CAN | Adenocarcinoma | malignant tumor | IIIC |
| 71XL | Pancreas | CAN | | villous adenoma | localized |
| | | | | with paneth cell | |
| | | | | metaplasia | |
| 71XL | Pancreas | NAT | | NL | |
| 82XP | Pancreas | CAN | | serious | |
| | | | | cystadenoma | |
| 82XP | Pancreas | NAT | | NL | |
| 92X | Pancreas | CAN | Ductal | ductal | mod to |
| | | | adenocarcinoma | adenocarcinoma | focally |
| | | | | | poorly |
| | | | | | diff. |
| 92X | Pancreas | NAT | | NL | |
| 77X | Pancreas | CAN | Hepatic | Hepatic adenoma | |
| | | | adenoma | | |
| 77X | Pancreas | NAT | | NL | |
| 23B | Prostate | CAN | | Prostate tumor | Gleason's |
| | | | | | 3 + 4 |
| 23B | Prostate | NAT | | NAT | |
| 65XB | Prostate | CAN | Adenocarcinoma | adenocarcinom | 3 + 4 = 7 |
| 65XB | Prostate | NAT | | NL | |
| 675P | Prostate | CAN | Adenocarcinoma | adenocarcinoma | |
| 675P | Prostate | NAT | | Normal | |
| 84XB | Prostate | CAN | Adenocarcinoma | adenocarcinom | 2 + 3 |
| 84XB | Prostate | NAT | | NL | |
| 958P | Prostate | CAN | Adenocarcinoma | Adenocarcinoma | T2C, NO, MX |
| 958P | Prostate | NAT | NAT | Normal | |
| 263C | Prostate | BPH | | BPH | |
| 276P | Prostate | BPH | | BPH | |
| 767B | Prostate | BPH | | prostate BPH | |
| 855P | Prostate | BPH | | BPH | |
| 10R | Prostate | PROST | | active chronic | T0, N0, M0 |
| | | | | prostatitis | |
| 20R | Prostate | PROST | | PROSTATITIS | |
| 287S | Skin | CAN | Squamous cell | Invasive | Moderately |
| | | | carcinoma | Keratinizing | Differentiated |
| | | | | Squamous Cell | |
| | | | | Carcinoma | |
| 287S | Skin | NAT | | NAT | |
| 39A | Skin | CAN | | CA | St. II |
| 39A | Skin | NAT | | CA | St. II |
| 669S | Skin | CAN | Melanoma | Nodular | |
| | | | | malignant | |
| | | | | melanoma | |
| 669S | Skin | NAT | | NAT | |
| 171S | Small | CAN | Adenocarcinoma | Moderately | |
| | Intestine | | | differentiated | |
| | | | | Adenocarcinoma, | |
| | | | | invasive | |
| 171S | Small | NAT | | NAT | |
| | Intestine | | | | |
| 20SM | Small | CAN | Adenocarcinoma | Adenocarcinoma, | St. IV, |
| | Intestine | | | metastic to lung | poorly |
| | | | | & liver | diff. |
| 20SM | Small | NAT | | NAT | |
| | Intestine | | | | |
| H89 | Small | CAN | Adenocarcinoma | Adenocarcimoa | 80% tumor, |
| | Intestine | | | | 50% |
| | | | | | necrosis, |
| | | | | | moderately |
| | | | | | differentiated, |
| | | | | | G2-3; |
| | | | | | T3N1MX |
| H89 | Small | NAT | Adenocarcinoma | NAT | |
| | Intestine | | | | |
| 261S | Stomach | CAN | Signet-ring | Signet-ring cell | Stage IIIA, |
| | | | cell carcinoma | carcinoma | T3N1M0 |
| 261S | Stomach | NAT | | NAT | |
| 288S | Stomach | CAN | Adenocarcinoma | Infiltrating | Moderately |
| | | | | Adneocarcinoma | Differentiated |
| 288S | Stomach | NAT | | NAT | |
| AC93 | Stomach | CAN | Adenocarcinoma | Adenocarcinoma | St. IV, G4, |
| or | | | | | T4N3M0, |
| 509L | | | | | poorly |
| | | | | | diff. |
| AC93 | Stomach | NAT | | NAT | |
| or | | | | | |
| 509L | | | | | |
| 88S | Stomach | CAN | Adenocarcinoma | Mucinous | T3N1M0, St. |
| | | | | adenocarcinoma | IIIA |
| 88S | Stomach | NAT | | NAT | |
| 143N | Thyroid | CAN | Follicular | Follicular | |
| | Gland | | carcinoma | Carcinoma | |
| 143N | Thyroid | NAT | | NAT | |
| | Gland | | | | |
| 270T | Thyroid | CAN | | CA | |
| | Gland | | | | |
| 270T | Thyroid | NAT | | NAT | |
| | Gland | | | | |
| 56T | Thyroid | CAN | Papillary | Papillary | St. III; |
| | Gland | | carcinoma | Carcinoma | T4N1M0 |
| 56T | Thyroid | NAT | | NAT | |
| | Gland | | | | |
| 39X | Testes | CAN | | CA | |
| 39X | Testes | NAT | | NAT | |
| 647T | Testes | CAN | Teratocarcinoma | Teratocarcinoma | Stage IA |
| 647T | Testes | NAT | Teratocarcinoma | NAT | |
| 663T | Testes | CAN | Teratocarcinoma | Teratocarcinoma | |
| 663T | Testes | NAT | | NAT | |
| 135XO | Uterus | CAN | | Uterus normal | |
| 135XO | Uterus | NAT | | Uterus tumor | |
| 85XU | Uterus | CAN | | endometrial | I |
| | | | | carcinoma | |
| 85XU | Uterus | NAT | | NL | |
| B1 | Blood | NRM | | Normal | |
| B3 | Blood | NRM | | Normal | |
| B5 | Blood | NRM | | Normal | |
| B6 | Blood | NRM | | Normal | |
| B11 | Blood | NRM | | Normal | |
| 982B | Blood | NRM | | Normal | |
| B69 | Blood | NRM | | Normal | |
| B72 | Blood | NRM | | Normal | |
| B73 | Blood | NRM | | Normal | |
| B75 | Blood | NRM | | Normal | |
| 48AD | Adrenal | NRM | | Normal | |
| | Gland | | | | |
| 10BR | Brain | NRM | | Normal | |
| 01CL | Colon | NRM | | Normal | |
| 06CV | Cervix | NRM | | Normal | |
| 01ES | Esophagus | NRM | | Normal | |
| 46HR | Heart | NRM | | Normal | |
| 00HR | Human | CAN | CAN | Cancer pool | |
| | Reference | | | | |
| 55KD | Kidney | NRM | | Normal | |
| 89LV | Liver | NRM | | Normal | |
| 90LN | Lung | NRM | | Normal | |
| 01MA | Mammary | NRM | | Normal | |
| 84MU | Skeletal | NRM | | Normal | |
| | Muscle | | | | |
| 3APV | Ovary | NRM | | Normal | |
| 04PA | Pancreas | NRM | | Normal | |
| 59PL | Placenta | NRM | | Normal | |
| 09PR | Prostate | NRM | | Normal | |
| 21RC | Rectum | NRM | | Normal | |
| 59SM | Small | NRM | | Normal | |
| | Intestine | | | | |
| 7GSP | Spleen | NRM | | Normal | |
| 09ST | Stomach | NRM | | Normal | |
| 4GTS | Testes | NRM | | Normal | |
| 99TM | Thymus | NRM | | Normal | |
| | Gland | | | | |
| 16TR | Trachea | NRM | | Normal | |
| 57UT | Uterus | NRM | | Normal | |

DEX0450_{—}007.nt.1 (Cln260)

[0492] The relative expression level of Cln260 in various tissue samples is included below. Tissue samples include 78 pairs of matching samples, 7 non matched cancer samples, and 34 normal samples, all from various tissues annotated in the table. A matching pair is formed by mRNA from the cancer sample for a particular tissue and mRNA from the normal adjacent sample for that same tissue from the same individual. Of the normal samples 4 were blood samples which measured the expression levels in blood cells. Additionally, 2 prostatitis, and 4 Benign Prostatic Hyperplasia (BPH) samples are included. All the values are compared to colon cancer sample CLNC9XR (calibrator).

[0493] The table below contains the relative expression level values for the sample as compared to the calibrator. The table includes the Sample ID and expression level values for the following samples: Cancer (CAN), Normal Adjacent Tissue (NAT), Normal Tissue (NRM), Benign Prostatic Hyperplasia (BPH), and Prostatitis (PROST).

| Sample ID | CAN | NAT | NRM | BPH | PROST |
|---|---|---|---|---|---|
| CLNAS12 | 0.28 | 0.60 | | | |
| CLNAS46 | 1.08 | 0.07 | | | |
| CLNB34 | 0.52 | 0.00 | | | |
| CLNC9XR | 1.00 | 0.36 | | | |
| CLNCM67 | 0.99 | 0.78 | | | |
| CLNTX89 | 1.14 | 1.87 | | | |
| CLNAS43 | 0.00 | 0.00 | | | |
| CLNAS98 | 0.00 | 0.00 | | | |
| CLNRS53 | 4.88 | 6.41 | | | |
| CLNRC01 | 5.96 | 1.53 | | | |
| CLNSG27 | 0.00 | 1.92 | | | |
| CLNDC19 | 6.28 | 0.00 | | | |
| CLN401C | 4.67 | 4.98 | | | |
| CLNCM12 | 1.29 | 0.00 | | | |
| CLNTX01 | 3.99 | 0.00 | | | |
| BLD030B | 0.90 | 0.00 | | | |
| BLD520B | 0.00 | 0.67 | | | |
| BLDTR17 | 0.00 | 0.79 | | | |
| CVXKS52 | 0.00 | 1.28 | | | |
| CVXNK23 | 0.73 | 0.00 | | | |
| CVXNKS54 | 0.00 | 0.00 | | | |
| CVXNKS55 | 0.00 | 0.00 | | | |
| CVXNKS81 | 0.00 | 0.00 | | | |
| ENDO10479 | 0.00 | 6.68 | | | |
| ENDO28XA | 0.00 | 2.17 | | | |
| ENDO8XA | 0.00 | 0.16 | | | |
| KID106XD | 0.00 | 0.00 | | | |
| KID107XD | 4.62 | 0.00 | | | |
| KID109XD | 1.15 | 0.00 | | | |
| KID10XD | 6.52 | 0.00 | | | |
| KID22K | 0.11 | 0.12 | | | |
| LNG205L | 0.00 | 0.00 | | | |
| LNG315L | 5.00 | 0.00 | | | |
| LNG507L | 0.00 | 0.00 | | | |
| LNG528L | 0.00 | 0.00 | | | |
| LNG8837L | 1.78 | 1.31 | | | |
| LNGAC11 | 0.32 | 0.00 | | | |
| LNGAC39 | 0.00 | 0.00 | | | |
| LNGSQ80 | 0.00 | 0.00 | | | |
| LNGSQ81 | 0.00 | 3.36 | | | |
| LVR15XA | 0.60 | 0.36 | | | |
| LVR174L | 0.00 | 1.25 | | | |
| LVR187L | 0.00 | 1.21 | | | |
| MAM19DN | 0.00 | 0.00 | | | |
| MAM42DN | 0.00 | 0.00 | | | |
| MAM517 | 0.00 | 0.00 | | | |
| MAM781M | 0.00 | 0.00 | | | |
| MAM869M | 2.67 | 0.00 | | | |
| MAM976M | 0.00 | 0.00 | | | |
| MAMS570 | 0.00 | 0.00 | | | |
| MAMS699 | 7.10 | 0.00 | | | |
| MAMS997 | 0.00 | 0.00 | | | |
| OVRG021 | 0.00 | 0.00 | | | |
| OVR1005O | 0.00 | | | | |
| OVR1040O | 0.56 | | | | |
| OVR105O | 3.85 | | | | |
| OVR130X | 0.00 | | | | |
| OVR718O | 0.00 | | | | |
| OVRA1B | 0.95 | | | | |
| OVR123O | | | 0.00 | | |
| OVR18GA | | | 2.81 | | |
| OVR206I | | | 0.00 | | |
| OVR337O | | | 0.00 | | |
| OVR40G | | | 2.37 | | |
| OVR515O | | | 0.00 | | |
| OVRC004 | | | 0.00 | | |
| OVRC177 | | | 0.00 | | |
| PAN71XL | 0.00 | 0.00 | | | |
| PAN82XP | 2.06 | 0.00 | | | |
| PAN92X | 0.00 | 0.00 | | | |
| PRO23B | 0.00 | 0.00 | | | |
| PRO65XB | 0.00 | 0.49 | | | |
| PRO675P | 0.00 | 0.00 | | | |
| PRO84XB | 0.00 | 0.00 | | | |
| PRO958P | 0.61 | 5.74 | | | |
| PRO263C | | | | 0.00 | |
| PRO276P | | | | 0.00 | |
| PRO767B | | | | 0.00 | |
| PRO855P | | | | 1.29 | |
| PRO10R | | | | | 0.00 |
| PRO20R | | | | | 0.00 |
| SKN287S | 0.00 | 0.00 | | | |
| SKN39A | 0.00 | 0.00 | | | |
| SKN669S | 0.00 | 0.00 | | | |
| SMINT171S | 0.00 | 0.00 | | | |
| SMINT20SM | 0.00 | 0.00 | | | |
| SMINTH89 | 0.00 | 0.00 | | | |
| STO261S | 0.00 | 0.00 | | | |
| STO288S | 1.05 | 0.00 | | | |
| STO88S | 0.00 | 0.00 | | | |
| THRD143N | 2.72 | 0.00 | | | |
| THRD270T | 0.00 | 0.00 | | | |
| THRD56T | 0.00 | 0.00 | | | |
| TST39X | 0.00 | 0.00 | | | |
| TST647T | 0.00 | 1.74 | | | |
| TST663T | 3.23 | 4.68 | | | |
| UTR135XO | 0.00 | 0.00 | | | |
| UTR85XU | 26.65 | 1.06 | | | |
| BLOB3 | | | 0.00 | | |
| BLOB6 | | | 0.00 | | |
| BLOB11 | | | 0.00 | | |
| BLO982B | | | 0.00 | | |
| ADR48AD | | | 0.00 | | |
| HUMREF00HR | 0.00 | | | | |
| BRN10BR | | | 0.00 | | |
| CLN01CL | | | 0.87 | | |
| ESO01ES | | | 0.00 | | |
| HRT46HR | | | 0.00 | | |
| KID55KD | | | 0.32 | | |
| LVR89LV | | | 0.00 | | |
| LNG90LN | | | 1.06 | | |
| MAM01MA | | | 0.00 | | |
| MSL84MU | | | 0.00 | | |
| OVR3APV | | | 0.14 | | |
| PAN04PA | | | 0.54 | | |
| PLA59PL | | | 0.00 | | |
| PRO09PR | | | 1.53 | | |
| REC21RC | | | 0.00 | | |
| SMINT59SM | | | 0.95 | | |
| SPL7GSP | | | 1.36 | | |
| STO09ST | | | 0.00 | | |
| THYM99TM | | | 0.00 | | |
| TRA16TR | | | 0.00 | | |
| TST4GTS | | | 7.07 | | |
| UTR57UT | | | 2.99 | | |

0.00 = Negative or Not Detected

[0494] The sensitivity for Cln260 expression was calculated for the cancer samples versus normal samples. The sensitivity value indicates the percentage of cancer samples that show levels of Cln260 at least 2 fold higher than the normal tissue or the corresponding normal adjacent form the same patient.

[0495] This specificity is an indication of the level of colon tissue specific expression of the transcript compared to all the other tissue types tested in our assay. Thus, these experiments indicate Cln260 being useful as a colon cancer diagnostic marker and/or therapeutic target.

[0496] Sensitivity and specificity data is reported in the table below.

| | CLN | LNG | MAM | OVR | PRO |
|---|---|---|---|---|---|
| Sensitivity, | 47% | 22% | 22% | 0% | 0% |
| Up vs. NAT | | | | | |
| Sensitivity, | 13% | 11% | 0% | 0% | 40% |
| Down vs. | | | | | |
| NAT | | | | | |
| Sensitivity, | 33% | 11% | 22% | 43% | 0% |
| Up vs. NRM | | | | | |
| Sensitivity, | 27% | 78% | 0% | 0% | 100% |
| Down vs. | | | | | |
| NRM | | | | | |
| Specificity | 70.93% | 64.13% | 61.96% | 64.52% | 63.98% |

[0497] Altogether, the tissue specificity, plus the mRNA differential expression in the samples tested are believed to make Cln260 a good marker for diagnosing, monitoring, staging, imaging and/or treating colon cancer.

[0498] Additionally, the tissue specificity, plus the mRNA differential expression in the samples tested are believed to make Cln260 a good marker for diagnosing, monitoring, staging, imaging and/or treating ovarian cancer.

[0499] Primers used for QPCR Expression Analysis of Cln260 are as follows:

| | |
|---|---|
| (Cln260_forward): | |
| GGCCAACTCTTTTTACTCCTTCATT | (SEQ ID NO: 249) |
| (Cln260_reverse): | |
| CAGGAGCATCTCCGTTTTCATT | (SEQ ID NO: 250) |
| (Cln260_probe): | |
| TCCAGTAGTTGGGCAGTGCTGGCA | (SEQ ID NO: 251) |

DEX0450_{—}053.nt.1 (Cln261)

[0500] The relative expression level of Cln261 in various tissue samples is included below. Tissue samples include 78 pairs of matching samples, 8 non matched cancer samples, and 36 normal samples, all from various tissues annotated in the table. A matching pair is formed by mRNA from the cancer sample for a particular tissue and mRNA from the normal adjacent sample for that same tissue from the same individual. Of the normal samples 5 were blood samples which measured the expression levels in blood cells. Additionally, 2 prostatitis, and 4 Benign Prostatic Hyperplasia (BPH) samples are included. All the values are compared to normal breast sample Mam01MA (calibrator).

[0501] The table below contains the relative expression level values for the sample as compared to the calibrator. The table includes the Sample ID and expression level values for the following samples: Cancer (CAN), Normal Adjacent Tissue (NAT), Normal Tissue (NRM), Benign Prostatic Hyperplasia (BPH), and Prostatitis (PROST).

| Sample ID | CAN | NAT | NRM | BPH | PROST |
|---|---|---|---|---|---|
| CLNAS12 | 1.30 | 0.14 | | | |
| CLNAS46 | 0.55 | 0.69 | | | |
| CLNB34 | 0.89 | 0.00 | | | |
| CLNCM67 | 1.18 | 0.14 | | | |
| CLNDC22 | 0.31 | 3.01 | | | |
| CLNTX89 | 0.81 | 0.21 | | | |
| CLN401C | 0.65 | 0.38 | | | |
| CLNAS43 | 1.56 | 0.72 | | | |
| CLNAS98 | 0.14 | 0.19 | | | |
| CLNCM12 | 0.34 | 0.06 | | | |
| CLNDC19 | 0.89 | 0.40 | | | |
| CLNRC01 | 1.54 | 0.28 | | | |
| CLNRS53 | 2.47 | 1.29 | | | |
| CLNSG27 | 1.62 | 0.27 | | | |
| CLNTX01 | 0.85 | 0.85 | | | |
| BLD030B | 2.56 | 1.55 | | | |
| BLD520B | 0.48 | 1.04 | | | |
| BLDTR17 | 1.50 | 0.71 | | | |
| CVXKS52 | 1.87 | 0.34 | | | |
| CVXNKS55 | 1.11 | 1.04 | | | |
| CVXNKS25 | 2.45 | 2.61 | | | |
| CVXNKS18 | 0.06 | 0.32 | | | |
| CVXNKS54 | 2.53 | 1.33 | | | |
| ENDO10479 | 16.57 | 2.34 | | | |
| ENDO28XA | 3.15 | 1.37 | | | |
| ENDO8XA | 0.32 | 2.21 | | | |
| KID106XD | 0.09 | 0.10 | | | |
| KID12XD | 0.14 | 1.54 | | | |
| KID10XD | 0.11 | 0.04 | | | |
| KID22K | 0.23 | 0.14 | | | |
| KID107XD | 0.42 | 0.18 | | | |
| LNG205L | 2.84 | 0.22 | | | |
| LNG315L | 2.27 | 1.88 | | | |
| LNG507L | 1.74 | 0.99 | | | |
| LNG528L | 7.04 | 2.07 | | | |
| LNG8837L | 4.48 | 0.98 | | | |
| LNGAC11 | 1.78 | 1.93 | | | |
| LNGAC39 | 11.41 | 2.38 | | | |
| LNGSQ80 | 3.11 | 1.94 | | | |
| LNGSQ81 | 4.22 | 3.14 | | | |
| LVR15XA | 0.16 | 0.06 | | | |
| LVR174L | 0.01 | 0.05 | | | |
| LVR187L | 0.06 | 0.50 | | | |
| MAM19DN | 0.90 | 0.42 | | | |
| MAM42DN | 1.21 | 0.65 | | | |
| MAM517 | 0.99 | 0.07 | | | |
| MAM781M | 0.67 | 0.29 | | | |
| MAM869M | 0.62 | 0.13 | | | |
| MAM976M | 0.33 | 0.39 | | | |
| MAMS570 | 0.08 | 0.86 | | | |
| MAMS699 | 0.66 | 0.88 | | | |
| MAMS997 | 3.12 | 1.05 | | | |
| OVRG021 | 0.71 | 3.06 | | | |
| OVR206I | | | 1.06 | | |
| OVR515O | | | 0.52 | | |
| OVR18GA | | | 0.73 | | |
| OVR337O | | | 0.65 | | |
| OVR123O | | | 0.00 | | |
| OVRC177 | | | 0.57 | | |
| OVR40G | | | 1.11 | | |
| OVR1005O | 0.61 | | | | |
| OVR1040O | 4.19 | | | | |
| OVR105O | 0.53 | | | | |
| OVR130X | 3.60 | | | | |
| OVR451O | | | 0.90 | | |
| OVR718O | 1.88 | | | | |
| OVRA1B | 3.31 | | | | |
| PAN71XL | 0.40 | 0.40 | | | |
| PAN77X | 0.09 | | | | |
| PAN92X | 0.21 | 0.71 | | | |
| PRO10R | | | | | 3.68 |
| PRO20R | | | | | 2.16 |
| PRO23B | 0.07 | 0.12 | | | |
| PRO263C | | | | 1.40 | |
| PRO276P | | | | 0.08 | |
| PRO65XB | 0.03 | 0.07 | | | |
| PRO675P | 0.13 | 0.09 | | | |
| PRO767B | | | | 1.33 | |
| PRO84XB | 0.10 | 0.31 | | | |
| PRO855P | | | | 0.05 | |
| PRO958P | 0.09 | 0.06 | | | |
| SKN287S | 0.27 | 0.21 | | | |
| SKN39A | 0.24 | 0.16 | | | |
| SKN669S | 0.45 | 0.10 | | | |
| SMINT171S | 0.16 | 0.08 | | | |
| SMINT20SM | 0.16 | 0.11 | | | |
| SMINTH89 | 0.60 | 0.17 | | | |
| STO261S | 0.27 | 0.24 | | | |
| STO288S | 0.30 | 0.11 | | | |
| STOAC93 | 0.26 | 0.50 | | | |
| STO88S | 0.29 | 0.03 | | | |
| THRD143N | 9.86 | 4.19 | | | |
| THRD270T | 3.59 | 2.98 | | | |
| THRD56T | 0.29 | 0.20 | | | |
| TST39X | 12.51 | 9.60 | | | |
| TST647T | 17.27 | 3.65 | | | |
| TST663T | 13.34 | 5.10 | | | |
| UTR135XO | 7.21 | 5.38 | | | |
| UTR85XU | 19.32 | 8.35 | | | |
| BLOB3 | | | 0.02 | | |
| BLOB11 | | | 0.53 | | |
| BLO69 | | | 0.13 | | |
| BLO72 | | | 0.19 | | |
| BLO73 | | | 0.43 | | |
| ADR48AD | | | 0.06 | | |
| BRN10BR | | | 0.33 | | |
| CLN01CL | | | 0.14 | | |
| CVX06CV | | | 1.28 | | |
| ESO01ES | | | 2.01 | | |
| HRT46HR | | | 0.66 | | |
| HUMREF00HR | 2.61 | | | | |
| KID55KD | | | 0.48 | | |
| LVR89LV | | | 0.05 | | |
| LNG90LN | | | 14.35 | | |
| MAM01MA | | | 1.00 | | |
| MSL84MU | | | 1.62 | | |
| OVR3APV | | | 4.73 | | |
| PAN04PA | | | 0.23 | | |
| PLA59PL | | | 1.23 | | |
| PRO09PR | | | 1.09 | | |
| REC21RC | | | 0.22 | | |
| SMINT59SM | | | 0.15 | | |
| SPL7GSP | | | 1.74 | | |
| STO09ST | | | 0.33 | | |
| THYM99TM | | | 0.54 | | |
| TRA16TR | | | 0.97 | | |
| TST4GTS | | | 2.46 | | |
| UTR57UT | | | 1.28 | | |

0.00 = Negative or Not Detected

[0502] The sensitivity for Cln261 expression was calculated for the cancer samples versus normal samples. The sensitivity value indicates the percentage of cancer samples that show levels of Cln261 at least 2 fold higher than the normal tissue or the corresponding normal adjacent form the same patient.

[0503] This specificity is an indication of the level of colon tissue specific expression of the transcript compared to all the other tissue types tested in our assay. Thus, these experiments indicate Cln261 being useful as a colon cancer diagnostic marker and/or therapeutic target.

[0504] Sensitivity and specificity data is reported in the table below.

| | CLN | LNG | MAM | OVR | PRO |
|---|---|---|---|---|---|
| Sensitivity, | 60% | 44% | 56% | 0% | 0% |
| Up vs. NAT | | | | | |
| Sensitivity, | 7% | 0% | 11% | 0% | 40% |
| Down vs. | | | | | |
| NAT | | | | | |
| Sensitivity, | 93% | 0% | 11% | 57% | 0% |
| Up vs. NRM | | | | | |
| Sensitivity, | 0% | 89% | 22% | 0% | 100% |
| Down vs. | | | | | |
| NRM | | | | | |
| Specificity | 12.57% | 37.43% | 8.56% | 25.93% | 1.06% |

[0505] Altogether, the tissue specificity, plus the mRNA differential expression in the samples tested are believed to make Cln261 a good marker for diagnosing, monitoring, staging, imaging and treating colon cancer.

[0506] Primers used for QPCR Expression Analysis of Cln261 are as follows:

| | |
|---|---|
| (Cln261_forward): | |
| TCGGCAGACATGTGCATTG | (SEQ ID NO: 252) |
| (Cln261_reverse): | |
| CGTTGCTTGTACGCTCCGTAA | (SEQ ID NO: 253) |
| (Cln261_probe): | |
| CATTGCGATTTCTCTTCTCATGATCCTGATATG | (SEQ ID NO: 254) |

### CONCLUSIONS

[0507] Altogether, the high level of tissue specificity, plus the mRNA overexpression in matched samples tested are indicative of SEQ ID NO: 1-94 being a diagnostic marker and/or a therapeutic target for cancer.

### Example 3

### Protein Expression

[0508] The CSNA is amplified by polymerase chain reaction (PCR) and the amplified DNA fragment encoding the CSNA is subcloned in pET-21d for expression in E. coli. In addition to the CSNA coding sequence, codons for two amino acids, Met-Ala, flanking the NH₂-terminus of the coding sequence of CSNA, and six histidines, flanking the COOH-terminus of the coding sequence of CSNA, are incorporated to serve as initiating Met/restriction site and purification tag, respectively.

[0509] An over-expressed protein band of the appropriate molecular weight may be observed on a Coomassie blue stained polyacrylamide gel. This protein band is confirmed by Western blot analysis using monoclonal antibody against 6× Histidine tag.

[0510] Large-scale purification of CSP is achieved using cell paste generated from 6-liter bacterial cultures, and purified using immobilized metal affinity chromatography (IMAC). Soluble fractions that are separated from total cell lysate were incubated with a nickel chelating resin. The column is packed and washed with five column volumes of wash buffer. CSP is eluted stepwise with various concentration imidazole buffers.

### Example 4

### Fusion Proteins

[0511] The human Fc portion of the IgG molecule can be PCR amplified, using primers that span the 5′ and 3′ ends of the sequence described below. These primers also should have convenient restriction enzyme sites that will facilitate cloning into an expression vector, preferably a mammalian expression vector. For example, if pC4 (Accession No. 209646) is used, the human Fc portion can be ligated into the BamHI cloning site. Note that the 3′ BamHI site should be destroyed. Next, the vector containing the human Fc portion is re-restricted with BamHI, linearizing the vector, and a polynucleotide of the present invention, isolated by the PCR protocol described in Example 2, is ligated into this BamHI site. Note that the polynucleotide is cloned without a stop codon, otherwise a fusion protein will not be produced. If the naturally occurring signal sequence is used to produce the secreted protein, pC4 does not need a second signal peptide. Alternatively, if the naturally occurring signal sequence is not used, the vector can be modified to include a heterologous signal sequence. See, e.g., WO 96/34891.

### Example 5

### Production of an Antibody from a Polypeptide

[0512] In general, such procedures involve immunizing an animal (preferably a mouse) with polypeptide or, more preferably, with a secreted polypeptide-expressing cell. Such cells may be cultured in any suitable tissue culture medium; however, it is preferable to culture cells in Earle's modified Eagle's medium supplemented with 10% fetal bovine serum (inactivated at about 56° C.), and supplemented with about 10 g/l of nonessential amino acids, about 1,000 U/ml of penicillin, and about 100, μg/ml of streptomycin. The splenocytes of such mice are extracted and fused with a suitable myeloma cell line. Any suitable myeloma cell line may be employed in accordance with the present invention; however, it is preferable to employ the parent myeloma cell line (SP20), available from the ATCC. After fusion, the resulting hybridoma cells are selectively maintained in HAT medium, and then cloned by limiting dilution as described by Wands et al., Gastroenterology 80: 225-232 (1981).

[0513] The hybridoma cells obtained through such a selection are then assayed to identify clones which secrete antibodies capable of binding the polypeptide. Alternatively, additional antibodies capable of binding to the polypeptide can be produced in a two-step procedure using anti-idiotypic antibodies. Such a method makes use of the fact that antibodies are themselves antigens, and therefore, it is possible to obtain an antibody which binds to a second antibody. In accordance with this method, protein specific antibodies are used to immunize an animal, preferably a mouse. The splenocytes of such an animal are then used to produce hybridoma cells, and the hybridoma cells are screened to identify clones which produce an antibody whose ability to bind to the protein-specific antibody can be blocked by the polypeptide. Such antibodies comprise anti-idiotypic antibodies to the protein specific antibody and can be used to immunize an animal to induce formation of further protein-specific antibodies.

### Example 6

### Method of Determining Alterations in a Gene Corresponding to a Polynucleotide

[0514] RNA is isolated from individual patients or from a family of individuals that have a phenotype of interest. cDNA is then generated from these RNA samples using protocols known in the art. See, Sambrook (2001), supra. The cDNA is then used as a template for PCR, employing primers surrounding regions of interest in SEQ ID NO: 1-94. Suggested PCR conditions consist of 35 cycles at 95° C. for 30 seconds; 60-120 seconds at 52-58° C.; and 60-120 seconds at 70° C., using buffer solutions described in Sidransky et al., Science 252(5006): 706-9 (1991). See also Sidransky et al., Science 278(5340): 1054-9 (1997).

[0515] PCR products are then sequenced using primers labeled at their 5′ end with T4 polynucleotide kinase, employing SequiTherm Polymerase. (Epicentre Technologies). The intron-exon borders of selected exons are also determined and genomic PCR products analyzed to confirm the results. PCR products harboring suspected mutations are then cloned and sequenced to validate the results of the direct sequencing. PCR products is cloned into T-tailed vectors as described in Holton et al., Nucleic Acids Res., 19: 1156 (1991) and sequenced with T7 polymerase (United States Biochemical). Affected individuals are identified by mutations not present in unaffected individuals.

[0516] Genomic rearrangements may also be determined. Genomic clones are nick-translated with digoxigenin deoxyuridine 5′ triphosphate (Boehringer Manheim), and FISH is performed as described in Johnson et al., Methods Cell Biol. 35: 73-99 (1991). Hybridization with the labeled probe is carried out using a vast excess of human cot-1 DNA for specific hybridization to the corresponding genomic locus.

[0517] Chromosomes are counterstained with 4,6-diamino-2-phenylidole and propidium iodide, producing a combination of C-and R-bands. Aligned images for precise mapping are obtained using a triple-band filter set (Chroma Technology, Brattleboro, Vt.) in combination with a cooled charge-coupled device camera (Photometrics, Tucson, Arz.) and variable excitation wavelength filters. Johnson (1991). Image collection, analysis and chromosomal fractional length measurements are performed using the ISee Graphical Program System. (Inovision Corporation, Durham, N.C.) Chromosome alterations of the genomic region hybridized by the probe are identified as insertions, deletions, and translocations. These alterations are used as a diagnostic marker for an associated disease.

### Example 7

### Method of Detecting Abnormal Levels of a Polypeptide in a Biological Sample

[0518] Antibody-sandwich ELISAs are used to detect polypeptides in a sample, preferably a biological sample. Wells of a microtiter plate are coated with specific antibodies, at a final concentration of 0.2 to 10 ug/ml. The antibodies are either monoclonal or polyclonal and are produced by the method described above. The wells are blocked so that non-specific binding of the polypeptide to the well is reduced. The coated wells are then incubated for >2 hours at RT with a sample containing the polypeptide. Preferably, serial dilutions of the sample should be used to validate results. The plates are then washed three times with deionized or distilled water to remove unbound polypeptide. Next, 50 μ1 of specific antibody-alkaline phosphatase conjugate, at a concentration of 25-400 ng, is added and incubated for 2 hours at room temperature. The plates are again washed three times with deionized or distilled water to remove unbound conjugate. 75 μl of 4-methylumbelliferyl phosphate (MUP) or p-nitrophenyl phosphate (NPP) substrate solution are added to each well and incubated 1 hour at room temperature.

[0519] The reaction is measured by a microtiter plate reader. A standard curve is prepared, using serial dilutions of a control sample, and polypeptide concentrations are plotted on the X-axis (log scale) and fluorescence or absorbance on the Y-axis (linear scale). The concentration of the polypeptide in the sample is calculated using the standard curve.

### Example 8

### Formulating a Polypeptide

[0520] The secreted polypeptide composition will be formulated and dosed in a fashion consistent with good medical practice, taking into account the clinical condition of the individual patient (especially the side effects of treatment with the secreted polypeptide alone), the site of delivery, the method of administration, the scheduling of administration, and other factors known to practitioners. The “effective amount” for purposes herein is thus determined by such considerations.

[0521] As a general proposition, the total pharmaceutically effective amount of secreted polypeptide administered parenterally per dose will be in the range of about 1, μg/kg/day to 10 mg/kg/day of patient body weight, although, as noted above, this will be subject to therapeutic discretion. More preferably, this dose is at least 0.01 mg/kg/day, and most preferably for humans between about 0.01 and 1 mg/kg/day for the hormone. If given continuously, the secreted polypeptide is typically administered at a dose rate of about 1 μl/kg/hour to about 50 mg/kg/hour, either by 1-4 injections per day or by continuous subcutaneous infusions, for example, using a mini-pump. An intravenous bag solution may also be employed. The length of treatment needed to observe changes and the interval following treatment for responses to occur appears to vary depending on the desired effect.

[0522] Pharmaceutical compositions containing the secreted protein of the invention are administered orally, rectally, parenterally, intracistemally, intravaginally, intraperitoneally, topically (as by powders, ointments, gels, drops or transdermal patch), bucally, or as an oral or nasal spray. “Pharmaceutically acceptable carrier” refers to a non-toxic-solid, semisolid or liquid filler, diluent, encapsulating material or formulation auxiliary of any type. The term “parenteral” as used herein refers to modes of administration which include intravenous, intramuscular, intraperitoneal, intrasternal, subcutaneous and intraarticular injection and infusion.

[0523] The secreted polypeptide is also suitably administered by sustained-release systems. Suitable examples of sustained-release compositions include semipermeable polymer matrices in the form of shaped articles, e.g., films, or microcapsules. Sustained-release matrices include polylactides (U.S. Pat. No. 3,773,919, EP 58,481, the contents of which are hereby incorporated by reference herein in their entirety), copolymers of L-glutamic acid and gamma-ethyl-L-glutamate (Sidman, U. et al., Biopolymers 22: 547-556 (1983)), poly (2-hydroxyethyl methacrylate) (R. Langer et al., J. Biomed. Mater. Res. 15: 167-277 (1981), and R. Langer, Chem. Tech. 12: 98-105 (1982)), ethylene vinyl acetate (R. Langer et al.) or poly-D-(−)-3-hydroxybutyric acid (EP 133,988). Sustained-release compositions also include liposomally entrapped polypeptides. Liposomes containing the secreted polypeptide are prepared by methods known per se: DE Epstein et al., Proc. Natl. Acad. Sci. USA 82: 3688-3692 (1985); Hwang et al., Proc. Natl. Acad. Sci. USA 77: 4030-4034 (1980); EP 52,322; EP 36,676; EP 88,046; EP 143,949; EP 142,641; Japanese Pat. Appl. 83-118008; U.S. Pat. Nos. 4,485,045 and 4,544,545; and EP 102,324, the contents of which are hereby incorporated by reference herein in their entirety. Ordinarily, the liposomes are of the small (about 200-800 Angstroms) unilamellar type in which the lipid content is greater than about 30 mol. percent cholesterol, the selected proportion being adjusted for the optimal secreted polypeptide therapy.

[0524] For parenteral administration, in one embodiment, the secreted polypeptide is formulated generally by mixing it at the desired degree of purity, in a unit dosage injectable form (solution, suspension, or emulsion), with a pharmaceutically acceptable carrier, i.e., one that is non-toxic to recipients at the dosages and concentrations employed and is compatible with other ingredients of the formulation.

[0525] For example, the formulation preferably does not include oxidizing agents and other compounds that are known to be deleterious to polypeptides. Generally, the formulations are prepared by contacting the polypeptide uniformly and intimately with liquid carriers or finely divided solid carriers or both. Then, if necessary, the product is shaped into the desired formulation. Preferably, the carrier is a parenteral carrier, more preferably, a solution that is isotonic with the blood of the recipient Examples of such carrier vehicles include water, saline, Ringer's solution, and dextrose solution. Non-aqueous vehicles such as fixed oils and ethyl oleate are also useful herein, as well as liposomes.

[0526] The carrier suitably contains minor amounts of additives such as substances that enhance isotonicity and chemical stability. Such materials are non-toxic to recipients at the dosages and concentrations employed, and include buffers such as phosphate, citrate, succinate, acetic acid, and other organic acids or their salts; antioxidants such as ascorbic acid; low molecular weight (less than about ten residues) polypeptides, e. g., polyarginine or tripeptides; proteins, such as serum albumin, gelatin, or immunoglobulins; hydrophilic polymers such as polyvinylpyrrolidone; amino acids, such as glycine, glutamic acid, aspartic acid, or arginine; monosaccharides, disaccharides, and other carbohydrates including cellulose or its derivatives, glucose, manose, or dextrins; chelating agents such as EDTA; sugar alcohols such as mannitol or sorbitol; counterions such as sodium; and/or nonionic surfactants such as polysorbates, poloxamers, or PEG.

[0527] The secreted polypeptide is typically formulated in such vehicles at a concentration of about 0.1 mg/ml to 100 mg/ml, preferably 1-10 mg/ml, at a pH of about 3 to 8. It will be understood that the use of certain of the foregoing excipients, carriers, or stabilizers will result in the formation of polypeptide salts.

[0528] Any polypeptide to be used for therapeutic administration can be sterile. Sterility is readily accomplished by filtration through sterile filtration membranes (e.g., 0.2 micron membranes). Therapeutic polypeptide compositions generally are placed into a container having a sterile access port, for example, an intravenous solution bag or vial having a stopper pierceable by a hypodermic injection needle.

[0529] Polypeptides ordinarily will be stored in unit or multi-dose containers, for example, sealed ampules or vials, as an aqueous solution or as a lyophilized formulation for reconstitution. As an example of a lyophilized formulation, 10-ml vials are filled with 5 ml of sterile-filtered 1% (w/v) aqueous polypeptide solution, and the resulting mixture is lyophilized. The infusion solution is prepared by reconstituting the lyophilized polypeptide using bacteriostatic Water-for-Injection.

[0530] The invention also provides a pharmaceutical pack or kit comprising one or more containers filled with one or more of the ingredients of the pharmaceutical compositions of the invention. Associated with such container(s) can be a notice in the form prescribed by a governmental agency regulating the manufacture, use or sale of pharmaceuticals or biological products, which notice reflects approval by the agency of manufacture, use or sale for human administration. In addition, the polypeptides of the present invention may be employed in conjunction with other therapeutic compounds.

### Example 9

### Method of Treating Decreased Levels of the Polypeptide

[0531] It will be appreciated that conditions caused by a decrease in the standard or normal expression level of a secreted protein in an individual can be treated by administering the polypeptide of the present invention, preferably in the secreted form. Thus, the invention also provides a method of treatment of an individual in need of an increased level of the polypeptide comprising administering to such an individual a pharmaceutical composition comprising an amount of the polypeptide to increase the activity level of the polypeptide in such an individual.

[0532] For example, a patient with decreased levels of a polypeptide receives a daily dose 0.1-100 ug/kg of the polypeptide for six consecutive days. Preferably, the polypeptide is in the secreted form. The exact details of the dosing scheme, based on administration and formulation, are provided above.

### Example 10

### Method of Treating Increased Levels of the Polypeptide

[0533] Antisense or RNAi technology are used to inhibit production of a polypeptide of the present invention. This technology is one example of a method of decreasing levels of a polypeptide, preferably a secreted form, due to a variety of etiologies, such as cancer.

[0534] For example, a patient diagnosed with abnormally increased levels of a polypeptide is administered intravenously antisense polynucleotides at 0.5, 1.0, 1.5, 2.0 and 3.0 mg/kg day for 21 days. This treatment is repeated after a 7-day rest period if the treatment was well tolerated. The formulation of the antisense polynucleotide is provided above.

### Example 11

### Method of Treatment Using Gene Therapy

[0535] One method of gene therapy transplants fibroblasts, which are capable of expressing a polypeptide, onto a patient. Generally, fibroblasts are obtained from a subject by skin biopsy. The resulting tissue is placed in tissue-culture medium and separated into small pieces. Small chunks of the tissue are placed on a wet surface of a tissue culture flask, approximately ten pieces are placed in each flask. The flask is turned upside down, closed tight and left at room temperature over night. After 24 hours at room temperature, the flask is inverted and the chunks of tissue remain fixed to the bottom of the flask and fresh media (e. g., Ham's F12 media, with 10% FBS, penicillin and streptomycin) is added. The flasks are then incubated at 37° C. for approximately one week.

[0536] At this time, fresh media is added and subsequently changed every several days. After an additional two weeks in culture, a monolayer of fibroblasts emerge. The monolayer is trypsinized and scaled into larger flasks. pMV-7 (Kirschmeier, P. T. et al., DNA, 7: 219-25 (1988)), flanked by the long terminal repeats of the Moloney murine sarcoma virus, is digested with EcoRI and HindIII and subsequently treated with calf intestinal phosphatase. The linear vector is fractionated on agarose gel and purified, using glass beads.

[0537] The cDNA encoding a polypeptide of the present invention can be amplified using PCR primers which correspond to the 5′ and 3′ end sequences respectively as set forth in Example 3. Preferably, the 5′ primer contains an EcoRI site and the 3′ primer includes a HindIII site. Equal quantities of the Moloney murine sarcoma virus linear backbone and the amplified EcoRI and HindIII fragment are added together, in the presence of T4 DNA ligase. The resulting mixture is maintained under conditions appropriate for ligation of the two fragments. The ligation mixture is then used to transform bacteria HB 101, which are then plated onto agar containing kanamycin for the purpose of confirming that the vector has the gene of interest properly inserted.

[0538] The amphotropic pA317 or GP+aml2 packaging cells are grown in tissue culture to confluent density in Dulbecco's Modified Eagles Medium (DMEM) with 10% calf serum (CS), penicillin and streptomycin. The MSV vector containing the gene is then added to the media and the packaging cells transduced with the vector. The packaging cells now produce infectious viral particles containing the gene (the packaging cells are now referred to as producer cells).

[0539] Fresh media is added to the transduced producer cells, and subsequently, the media is harvested from a 10 cm plate of confluent producer cells. The spent media, containing the infectious viral particles, is filtered through a millipore filter to remove detached producer cells and this media is then used to infect fibroblast cells. Media is removed from a sub-confluent plate of fibroblasts and quickly replaced with the media from the producer cells. This media is removed and replaced with fresh media.

[0540] If the titer of virus is high, then virtually all fibroblasts will be infected and no selection is required. If the titer is very low, then it is necessary to use a retroviral vector that has a selectable marker, such as neo or his. Once the fibroblasts have been efficiently infected, the fibroblasts are analyzed to determine whether protein is produced.

[0541] The engineered fibroblasts are then transplanted onto the host, either alone or after having been grown to confluence on cytodex 3 microcarrier beads.

### Example 12

### Method of Treatment Using Gene Therapy-In Vivo

[0542] Another aspect of the present invention is using in vivo gene therapy methods to treat disorders, diseases and conditions. The gene therapy method relates to the introduction of naked nucleic acid (DNA, RNA, and antisense DNA or RNA) sequences into an animal to increase or decrease the expression of the polypeptide.

[0543] The polynucleotide of the present invention may be operatively linked to a promoter or any other genetic elements necessary for the expression of the polypeptide by the target tissue. Such gene therapy and delivery techniques and methods are known in the art, see, for example, Tabata H. et al. Cardiovasc. Res. 35 (3): 470-479 (1997); Chao J et al. Pharmacol. Res. 35 (6): 517-522 (1997); Wolff J. A. Neuromuscul. Disord. 7 (5): 314-318 (1997), Schwartz B. et al. Gene Ther. 3 (5): 405-411 (1996); and Tsurumi Y. et al. Circulation 94 (12): 3281-3290 (1996); WO 90/11092, WO 98/11779; U.S. Pat. Nos. 5,693,622; 5,705,151; 5,580,859, the contents of which are hereby incorporated by reference herein in their entirety.

[0544] The polynucleotide constructs may be delivered by any method that delivers injectable materials to the cells of an animal, such as, injection into the interstitial space of tissues (heart, muscle, skin, colon, liver, intestine and the like). The polynucleotide constructs can be delivered in a pharmaceutically acceptable liquid or aqueous carrier.

[0545] The term “naked” polynucleotide, DNA or RNA, refers to sequences that are free from any delivery vehicle that acts to assist, promote, or facilitate entry into the cell, including viral sequences, viral particles, liposome formulations, lipofectin or precipitating agents and the like. However, the polynucleotides of the present invention may also be delivered in liposome formulations (such as those taught in Felgner P. L. et al. Ann. NY Acad. Sci. 772: 126-139 (1995) and Abdallah B. et al. Biol. Cell 85 (1): 1-7 (1995)) which can be prepared by methods well known to those skilled in the art.

[0546] The polynucleotide vector constructs used in the gene therapy method are preferably constructs that will not integrate into the host genome nor will they contain sequences that allow for replication. Any strong promoter known to those skilled in the art can be used for driving the expression of DNA. Unlike other gene therapies techniques, one major advantage of introducing naked nucleic acid sequences into target cells is the transitory nature of the polynucleotide synthesis in the cells. Studies have shown that non-replicating DNA sequences can be introduced into cells to provide production of the desired polypeptide for periods of up to six months.

[0547] The polynucleotide construct can be delivered to the interstitial space of tissues within the an animal, including of muscle, skin, brain, colon, liver, spleen, bone marrow, thymus, heart, lymph, blood, bone, cartilage, pancreas, kidney, gall bladder, stomach, intestine, testis, ovary, uterus, rectum, nervous system, eye, gland, and connective tissue. Interstitial space of the tissues comprises the intercellular fluid, mucopolysaccharide matrix among the reticular fibers of organ tissues, elastic fibers in the walls of vessels or chambers, collagen fibers of fibrous tissues, or that same matrix within connective tissue ensheathing muscle cells or in the lacunae of bone. It is similarly the space occupied by the plasma of the circulation and the lymph fluid of the lymphatic channels. Delivery to the interstitial space of muscle tissue is preferred for the reasons discussed below. They may be conveniently delivered by injection into the tissues comprising these cells. They are preferably delivered to and expressed in persistent, non-dividing cells which are differentiated, although delivery and expression may be achieved in non-differentiated or less completely differentiated cells, such as, for example, stem cells of blood or skin fibroblasts. In vivo muscle cells are particularly competent in their ability to take up and express polynucleotides.

[0548] For the naked polynucleotide injection, an effective dosage amount of DNA or RNA will be in the range of from about 0.05 μg/kg body weight to about 50 mg/kg body weight. Preferably the dosage will be from about 0.005 mg/kg to about 20 mg/kg and more preferably from about 0.05 mg/kg to about 5 mg/kg. Of course, as the artisan of ordinary skill will appreciate, this dosage will vary according to the tissue site of injection. The appropriate and effective dosage of nucleic acid sequence can readily be determined by those of ordinary skill in the art and may depend on the condition being treated and the route of administration. The preferred route of administration is by the parenteral route of injection into the interstitial space of tissues. However, other parenteral routes may also be used, such as, inhalation of an aerosol formulation particularly for delivery to colons or bronchial tissues, throat or mucous membranes of the nose. In addition, naked polynucleotide constructs can be delivered to arteries during angioplasty by the catheter used in the procedure.

[0549] The dose response effects of injected polynucleotide in muscle in vivo is determined as follows. Suitable template DNA for production of mRNA coding for polypeptide of the present invention is prepared in accordance with a standard recombinant DNA methodology. The template DNA, which may be either circular or linear, is either used as naked DNA or complexed with liposomes. The quadriceps muscles of mice are then injected with various amounts of the template DNA.

[0550] Five to six week old female and male Balb/C mice are anesthetized by intraperitoneal injection with 0.3 ml of 2.5% Avertin. A 1.5 cm incision is made on the anterior thigh, and the quadriceps muscle is directly visualized. The template DNA is injected in 0.1 ml of carrier in a 1 cc syringe through a 27 gauge needle over one minute, approximately 0.5 cm from the distal insertion site of the muscle into the knee and about 0.2 cm deep. A suture is placed over the injection site for future localization, and the skin is closed with stainless steel clips.

[0551] After an appropriate incubation time (e.g., 7 days) muscle extracts are prepared by excising the entire quadriceps. Every fifth 15 um cross-section of the individual quadriceps muscles is histochemically stained for protein expression. A time course for protein expression may be done in a similar fashion except that quadriceps from different mice are harvested at different times. Persistence of DNA in muscle following injection may be determined by Southern blot analysis after preparing total cellular DNA and HIRT supernatants from injected and control mice.

[0552] The results of the above experimentation in mice can be use to extrapolate proper dosages and other treatment parameters in humans and other animals using naked DNA.

### Example 13

### Transgenic Animals

[0553] The polypeptides of the invention can also be expressed in transgenic animals. Animals of any species, including, but not limited to, mice, rats, rabbits, hamsters, guinea pigs, pigs, micro-pigs, goats, sheep, cows and non-human primates, e. g., baboons, monkeys, and chimpanzees may be used to generate transgenic animals. In a specific embodiment, techniques described herein or otherwise known in the art, are used to express polypeptides of the invention in humans, as part of a gene therapy protocol.

[0554] Any technique known in the art may be used to introduce the transgene (I. e., polynucleotides of the invention) into animals to produce the founder lines of transgenic animals. Such techniques include, but are not limited to, pronuclear microinjection (Paterson et al., Appl. Microbiol. Biotechnol. 40: 691-698 (1994); Carver et al., Biotechnology 11: 1263-1270 (1993); Wright et al., Biotechnology 9: 830-834 (1991); and U.S. Pat. No. 4,873,191, the contents of which is hereby incorporated by reference herein in its entirety); retrovirus mediated gene transfer into germ lines (Van der Putten et al., Proc. Natl. Acad. Sci., USA 82: 6148-6152 (1985)), blastocysts or embryos; gene targeting in embryonic stem cells (Thompson et al., Cell 56: 313-321 (1989)); electroporation of cells or embryos (Lo, 1983, Mol Cell. Biol. 3: 1803-1814 (1983)); introduction of the polynucleotides of the invention using a gene gun (see, e. g., Ulmer et al., Science 259: 1745 (1993); introducing nucleic acid constructs into embryonic pleuripotent stem cells and transferring the stem cells back into the blastocyst; and sperm mediated gene transfer (Lavitrano et al., Cell 57: 717-723 (1989). For a review of such techniques, see Gordon, “Transgenic Animals,” Intl. Rev. Cytol. 115: 171-229 (1989).

[0555] Any technique known in the art may be used to produce transgenic clones containing polynucleotides of the invention, for example, nuclear transfer into enucleated oocytes of nuclei from cultured embryonic, fetal, or adult cells induced to quiescence (Campell et al., Nature 380: 64-66 (1996); Wilmut et al., Nature 385: 810813 (1997)).

[0556] The present invention provides for transgenic animals that carry the transgene in all their cells, as well as animals which carry the transgene in some, but not all their cells, I. e., mosaic animals or chimeric. The transgene may be integrated as a single transgene or as multiple copies such as in concatamers, e.g., head-to-head tandems or head-to-tail tandems. The transgene may also be selectively introduced into and activated in a particular cell type by following, for example, the teaching of Lasko et al. (Lasko et al., Proc. Natl. Acad. Sci. USA 89: 6232-6236 (1992)). The regulatory sequences required for such a cell-type specific activation will depend upon the particular cell type of interest, and will be apparent to those of skill in the art. When it is desired that the polynucleotide transgene be integrated into the chromosomal site of the endogenous gene, gene targeting is preferred. Briefly, when such a technique is to be utilized, vectors containing some nucleotide sequences homologous to the endogenous gene are designed for the purpose of integrating, via homologous recombination with chromosomal sequences, into and disrupting the function of the nucleotide sequence of the endogenous gene. The transgene may also be selectively introduced into a particular cell type, thus inactivating the endogenous gene in only that cell type, by following, for example, the teaching of Gu et al. (Gu et al., Science 265: 103-106 (1994)). The regulatory sequences required for such a cell-type specific inactivation will depend upon the particular cell type of interest, and will be apparent to those of skill in the art.

[0557] Once transgenic animals have been generated, the expression of the recombinant gene may be assayed utilizing standard techniques. Initial screening may be accomplished by Southern blot analysis or PCR techniques to analyze animal tissues to verify that integration of the transgene has taken place. The level of mRNA expression of the transgene in the tissues of the transgenic animals may also be assessed using techniques which include, but are not limited to, Northern blot analysis of tissue samples obtained from the animal, in situ hybridization analysis, and reverse transcriptase-PCR (rt-PCR). Samples of transgenic gene-expressing tissue may also be evaluated immunocytochemically or immunohistochemically using antibodies specific for the transgene product.

[0558] Once the founder animals are produced, they may be bred, inbred, outbred, or crossbred to produce colonies of the particular animal. Examples of such breeding strategies include, but are not limited to: outbreeding of founder animals with more than one integration site in order to establish separate lines; inbreeding of separate lines in order to produce compound transgenics that express the transgene at higher levels because of the effects of additive expression of each transgene; crossing of heterozygous transgenic animals to produce animals homozygous for a given integration site in order to both augment expression and eliminate the need for screening of animals by DNA analysis; crossing of separate homozygous lines to produce compound heterozygous or homozygous lines; and breeding to place the transgene on a distinct background that is appropriate for an experimental model of interest.

[0559] Transgenic animals of the invention have uses which include, but are not limited to, animal model systems useful in elaborating the biological function of polypeptides of the present invention, studying conditions and/or disorders associated with aberrant expression, and in screening for compounds effective in ameliorating such conditions and/or disorders.

### Example 14

### Knock-Out Animals

[0560] Endogenous gene expression can also be reduced by inactivating or “knocking out” the gene and/or its promoter using targeted homologous recombination. (E. g., see Smithies et al., Nature 317: 230-234 (1985); Thomas & Capecchi, Cell 51: 503512 (1987); Thompson et al., Cell 5: 313-321 (1989)) Alternatively, RNAi technology may be used. For example, a mutant, non-functional polynucleotide of the invention (or a completely unrelated DNA sequence) flanked by DNA homologous to the endogenous polynucleotide sequence (either the coding regions or regulatory regions of the gene) can be used, with or without a selectable marker and/or a negative selectable marker, to transfect cells that express polypeptides of the invention in vivo. In another embodiment, techniques known in the art are used to generate knockouts in cells that contain, but do not express the gene of interest. Insertion of the DNA construct, via targeted homologous recombination, results in inactivation of the targeted gene. Such approaches are particularly suited in research and agricultural fields where modifications to embryonic stem cells can be used to generate animal offspring with an inactive targeted gene (e. g., see Thomas & Capecchi 1987 and Thompson 1989, supra). However, this approach can be routinely adapted for use in humans provided the recombinant DNA constructs are directly administered or targeted to the required site in vivo using appropriate viral vectors that will be apparent to those of skill in the art.

[0561] In further embodiments of the invention, cells that are genetically engineered to express the polypeptides of the invention, or alternatively, that are genetically engineered not to express the polypeptides of the invention (e. g., knockouts) are administered to a patient in vivo. Such cells may be obtained from the patient (i.e., animal, including human) or an MHC compatible donor and can include, but are not limited to fibroblasts, bone marrow cells, blood cells (e. g., lymphocytes), adipocytes, muscle cells, endothelial cells etc. The cells are genetically engineered in vitro using recombinant DNA techniques to introduce the coding sequence of polypeptides of the invention into the cells, or alternatively, to disrupt the coding sequence and/or endogenous regulatory sequence associated with the polypeptides of the invention, e.g., by transduction (using viral vectors, and preferably vectors that integrate the transgene into the cell genome) or transfection procedures, including, but not limited to, the use of plasmids, cosmids, YACs, naked DNA, electroporation, liposomes, etc.

[0562] The coding sequence of the polypeptides of the invention can be placed under the control of a strong constitutive or inducible promoter or promoter/enhancer to achieve expression, and preferably secretion, of the polypeptides of the invention. The engineered cells which express and preferably secrete the polypeptides of the invention can be introduced into the patient systemically, e. g., in the circulation, or intraperitoneally.

[0563] Alternatively, the cells can be incorporated into a matrix and implanted in the body, e. g., genetically engineered fibroblasts can be implanted as part of a skin graft; genetically engineered endothelial cells can be implanted as part of a lymphatic or vascular graft. (See, for example, Anderson et al. U.S. Pat. No. 5,399,349; and Mulligan & Wilson, U.S. Pat. No. 5,460,959, the contents of which are hereby incorporated by reference herein in their entirety).

[0564] When the cells to be administered are non-autologous or non-MHC compatible cells, they can be administered using well known techniques which prevent the development of a host immune response against the introduced cells. For example, the cells may be introduced in an encapsulated form which, while allowing for an exchange of components with the immediate extracellular environment, does not allow the introduced cells to be recognized by the host immune system.

[0565] Transgenic and “knock-out” animals of the invention have uses which include, but are not limited to, animal model systems useful in elaborating the biological function of polypeptides of the present invention, studying conditions and/or disorders associated with aberrant expression, and in screening for compounds effective in ameliorating such conditions and/or disorders.

[0566] While preferred illustrative embodiments of the present invention are described, one skilled in the art will appreciate that the present invention can be practiced by other than the described embodiments, which are presented for purposes of illustration only and not by way of limitation. The present invention is limited only by the claims that follow.

1. An isolated nucleic acid molecule comprising:
(a) a nucleic acid molecule comprising a nucleic acid sequence that encodes an amino acid sequence of SEQ ID NO: 95-248;
(b) a nucleic acid molecule comprising a nucleic acid sequence of SEQ ID NO: 1-94;
(c) a nucleic acid molecule that selectively hybridizes to the nucleic acid molecule of (a) or (b); or
(d) a nucleic acid molecule having at least 95% sequence identity to the nucleic acid molecule of (a) or (b).

2. The nucleic acid molecule according to claim 1, wherein the nucleic acid molecule is a cDNA.

3. The nucleic acid molecule according to claim 1, wherein the nucleic acid molecule is genomic DNA.

4. The nucleic acid molecule according to claim 1, wherein the nucleic acid molecule is an RNA.

5. The nucleic acid molecule according to claim 1, wherein the nucleic acid molecule is a mammalian nucleic acid molecule

6. The nucleic acid molecule according to claim 5, wherein the nucleic acid molecule is a human nucleic acid molecule.

7. A method for determining the presence of a colon specific nucleic acid (CSNA) in a sample, comprising the steps of:
(a) contacting the sample with the nucleic acid molecule of claim 1 under conditions in which the nucleic acid molecule will selectively hybridize to a colon specific nucleic acid; and
(b) detecting hybridization of the nucleic acid molecule to a CSNA in the sample, wherein the detection of the hybridization indicates the presence of a CSNA in the sample.

8. A vector comprising the nucleic acid molecule of claim 1.

9. A host cell comprising the vector according to claim 8.

10. A method for producing a polypeptide encoded by the nucleic acid molecule according to claim 1, comprising the steps of:
(a) providing a host cell comprising the nucleic acid molecule operably linked to one or more expression control sequences, and
(b) incubating the host cell under conditions in which the polypeptide is produced.

11. A polypeptide encoded by the nucleic acid molecule according to claim 1.

12. An isolated polypeptide selected from the group consisting of:
(a) a polypeptide comprising an amino acid sequence with at least 95% sequence identity to of SEQ ID NO: 95-248 ; or
(b) a polypeptide comprising an amino acid sequence encoded by a nucleic acid molecule having at least 95% sequence identity to a nucleic acid molecule comprising a nucleic acid sequence of SEQ ID NO: 1-94.

13. An antibody or fragment thereof that specifically binds to a polypeptide of claim 12.

14. A method for determining the presence of a colon specific protein in a sample, comprising the steps of:
(a) contacting the sample with a suitable reagent under conditions in which the reagent will selectively interact with the colon specific protein comprising an a polypeptide of claim 12; and
(b) detecting the interaction of the reagent with a colon specific protein in the sample, wherein the detection of binding indicates the presence of a colon specific protein in the sample.

15. A method for diagnosing or monitoring the presence and metastases of colon cancer in a patient, comprising the steps of:
(a) determining an amount of:
(i) a nucleic acid molecule comprising a nucleic acid sequence that encodes an amino acid sequence of SEQ ID NO: 95-248;
(ii) a nucleic acid molecule comprising a nucleic acid sequence of SEQ ID NO: 1-94;
(iii) a nucleic acid molecule that selectively hybridizes to the nucleic acid molecule of (i) or (ii);
(iv) a nucleic acid molecule having at least 95% sequence identity to the nucleic acid molecule of (i) or (ii);
(v) a polypeptide comprising an amino acid sequence with at least 95% sequence identity to of SEQ ID NO: 95-248 ; or
(vi) a polypeptide comprising an amino acid sequence encoded by a nucleic acid molecule having at least 95% sequence identity to a nucleic acid molecule comprising a nucleic acid sequence of SEQ ID NO: 1-94 and;
(b) comparing the amount of the determined nucleic acid molecule or the polypeptide in the sample of the patient to the amount of the colon specific marker in a normal control; wherein a difference in the amount of the nucleic acid molecule or the polypeptide in the sample compared to the amount of the nucleic acid molecule or the polypeptide in the normal control is associated with the presence of colon cancer.

16. A kit for detecting a risk of cancer or presence of cancer in a patient, said kit comprising a means for determining the presence of:
(a) a nucleic acid molecule comprising a nucleic acid sequence that encodes an amino acid sequence of SEQ ID NO: 95-248;
(b) a nucleic acid molecule comprising a nucleic acid sequence of SEQ ID NO: 1-94;
(c) a nucleic acid molecule that selectively hybridizes to the nucleic acid molecule of (a) or (b); or
(d) a nucleic acid molecule having at least 95% sequence identity to the nucleic acid molecule of (a) or (b); or
(e) a polypeptide of claim 12.

17. A method of treating a patient with colon cancer, comprising the step of administering a composition consisting of:
(a) a nucleic acid molecule comprising a nucleic acid sequence that encodes an amino acid sequence of SEQ ID NO: 95-248;
(b) a nucleic acid molecule comprising a nucleic acid sequence of SEQ ID NO: 1-94;
(c) a nucleic acid molecule that selectively hybridizes to the nucleic acid molecule of (a) or (b);
(d) a nucleic acid molecule having at least 95% sequence identity to the nucleic acid molecule of (a) or (b); or
(e) a polypeptide of claim 12;
to a patient in need thereof, wherein said administration induces an immune response against the colon cancer cell expressing the nucleic acid molecule or polypeptide.

18. A vaccine comprising the polypeptide or the nucleic acid encoding the polypeptide of claim 12.

The application's sequence listing, which the Patent Office published only in electronic form, follows.

SEQUENCE LISTING (254 sequences)

SEQ ID NO: 1 - DNA, 2309 bp, Homo sapien
catccgggtggccacagagcaacttcctctagagggagctgattggagccgggtgccgctggcacctctatgatcactggagtctcgcgggtccctcgggctgcacagggacaagtaaaggctacatccagatgccgggaatgcactgacgcccattcctggaaactgggctcccactcagcccctgggagcagcagccgccagcccctcgggacctccatctccaccctgctgagccacccgggttgggccaggatcccggcaggctgatcccgtcctccactgagacctgaaaaatggcttcggggcaaggcccaggtcctcccaggcaggagtgcggagagcctgccctgccctctgcttctgaggagcaggtagcccaggacacagaggaggttttccgcagctacgttttttaccgccatcagcaggaacaggaggctgaaggggtggctgcccctgccgacccagagatggtcaccttacctctgcaacctagcagcaccatggggcaggtgggacggcagctcgccatcatcggggacgacatcaaccgacgctatgactcagagttccagaccatgttgcagcacctgcagcccacggcagagaatgcctatgagtacttcaccaagattgccaccagcctgtttgagagtggcatcaattggggccgtgtggtggctcttctgggcttcggctaccgtctggccctacacgtctaccagcatggcctgactggcttcctaggccaggtgacccgcttcgtggtcgacttcatgctgcatcactgcattgcccggtggattgcacagaggggtggctgggtgagtatccaaggactgcaatgtcctccctgctgttggggctgcccctctcccaggccccaccccttcctcgggttcctatatcttctgctagcctctctgtgaccaccttgtttctcccggcaggtggcagccctgaacttgggcaatggtcccatcctgaacgtgctggtggttctgggtgtggttctgttgggccagtttgtggtacgaagattcttcaaatcatgactcccaagggtgccctttggggtcccggttcagacccctgcctggacttaagcgaagtctttgccttctctgctcccttgcaggggtcccccctcaagagtacagaagctttagcaagtgtgcactccagcttcggagggcccctgcgtgggggccagtcaggctgcagaggcacctcaacattgcatggtgctagtgggccctctctctgggcccaggggctgtggccgtctcctccctcagctctctgggacctccttagccctgtctgctaggcgctggggagactgataacttggggaggcaagagactgggagccacttctccccagaaagtgtttaacggttttagctttttataatacccttgtgagagcccattcccaccattctacctgaggccaggacgtctggggtgtggggattggtgggtctatgttccccaggattcagctattctggaagatcagcaccctaagagatgggactaggacctgagcctggtcctggccgtccctaagcatgtgtcccaggagcaggacctactaggagaggggggccaaggtcctgctcaactctacccctgctcccattcctccctccggccatactgcctttgcagttggactctcagggattctgggcttggggtgtggggtggggtggagtcgcagaccagagctgtctgaactcacgtgtcagaagcctccaagcctgcctcccaaggtcctctcagttctctcccttcctctctccttatagacacttgctcccaacccattcactacaggtgaaggctctcacccccatccctgggggccttgggtgagtggcctgctaaggctcctccttgcccagactacagggcttaggacttggtttgttatttcagggaaaaggagtagggagttcatctggagggttctaagtgggagaaggactatcaacaccactaggaatcccagaggtgggatcctccctcatggctctggcacagtgtaatccaggggtgtagatgggggaactgtgaatacttgaactctgttcccccaccctccatgctcctcacctgtctaggtctcctcagggtggggggtgacagtgccttctctattgggcacagcctagggtcttgggggtcaggggggagaagttcttgattcagccaaatgcagggaggggaggcagatggagcccataggccaccccctatcctctgagtgtttggaaataaactgtgcaatcccctca

SEQ ID NO: 2 - DNA, 2880 bp, Homo sapien
tttttttcatttttcttttttgtagaggcagggtcttaccatgttgcccaggctggtcttgaactcctagcctcaaagtaattatcccaccttggcctccaaaagtgttgggattgcaggcatgagccactgtttccggtcatgttacatttttaagtagatttctcaaaacaccatgagatacgtcttacttctcataggccagaacttagtcacaaggtcacatctagctatgagggactgggcagctgtgagccataaaaggcagaagatggcagaaggggtattggataggcaactggcagtctttgctatagacatccttgcagggctagggaattgggtaatgtcccccacagtgcctttctatctgaacatgtcattctttccatatttgggaacctgagaattcgggttaattgcccaccataaatatcaaggactgtcatggaatctagtgctttctggcaaagtcagcctcatatgtaattcagtaaacctttttgagtacttagtatttgaaaagctgtgagctaggtgctttggggggtatgagaatgagtacagtatcctattttggtctagaggatcatagctcaggaagagaaggtgggaaaagctgtagtggctgattttaaagactgtccgtgtacgctagacagtttaacttagcccctgtcctagttcctggaaggtcatggaattgggaaaaagaatttacttgggccggacgtggtggctcacgcctgtaatcccagcactttgggaggccgaggcgggaggatcacctgaggtcaggagttcgagaccagcctgaccagtatggagaaaccccatctctactaaaaacacaaaattagctgggtatggtggcgcatgcctgtaatcccagctactcaggaggctgaggcaggagaatcgcttgaacctgggaggcagaggttgcggtgggccgagatggcgccattgcactccagcctgggcaacaagcgaaactccatctcaaaaaaaaaaaaaatttactcatgttttttaaatttggctgaaagaatcaggattcctgaaccttggatcacacctccagatttgcaagagaaaatccacatttttgcccaaaaatgtctattcttgacggagagtctaaagcagttcacagaaaaaatgcagtcagatatggagaaaatccaagaattaagagaggctcagttatactcagtggacgtgactctggacccagacacggcctaccccagcctgatcctctctgataatctgcggcaagtgcggtacagttacctccaacaggacctgcctgacaaccccgagaggttcaatctgtttccctgtgtcttgggctctccatgcttcatcgccgggagacattattgggaggtagaggtgggagataaagccaagtggaccataggtgtctgtgaagactcagtgtgcagaaaaggtggagtaacctcagccccccagaatggattctgggcagtgtctttgtggtatgggaaagaatattgggctcttacctccccaatgactgccctacccctgcggaccccgctccagcgggtggggattttcttggactatgatgctggtgaggtctccttctacaacgtgacagagaggtgtcacaccttcactttctctcatgctaccttttgtgggcctgtccggccctacttcagtctgagttactcgggagggaaaagtgcagctcctctgatcatctgccccatgagtgggatagatgggttttctggccatgttgggaatcatggtcattccatggagacctccccttgaggaggtgaattcaggccaaaagggctgttggctgtaatcctacgccaggcacaaggcatcttgttgccttgccacgtcctgtcacagctgggtatccttaccatgttccacgcccttgcagtgggagacaggatgtccatgttctctaccatccttttccttcccatgcagattgtgaaatgtaatgagatgtatcaagatatcctagaaataaaaaccagatgtccacctccagtgtttcatactttctggttttacacatcgctggagggataaagagtatggataatctttggatttggagagccgttcaagatacttccagcttcttggctcagcctggcttcctctggttcagccccacataatgattatggctatttgctgtcatttctgggctagggctcctttctaacaacctagactggaataaggccctgtcagcatggctccctttatcccagttttccgtctgggaacagtacctctgcccctgattcccaatgtgccatagttttattaactccattaaagaagcctgtatgtgttttggttagttacagttattttacaataatggtgggtaatggccccacctctgttatgagataatgttctaatcaatgtctctgcctttgtatcttttctgagggctttgtctgttctcttcattctaatgaaaggtgtattctagtgctgggtgcatatcatccaggataatattctgcccaactccatcctctgttactagatcccttaccagtcacatttgtggactggtggccagtcgtataccatccctggaaggattctgggacaatattccagggattcattgacttcttggctccttttctccatttcctttgggggaagggggaattgaccatgcttaagtgcatcctatcaaggggcagctccgtccccatggccattggatcatgagacactctgaagtcagaaggctggggcagatcacttcaagcaagcccccatgatggttctcagtcctgcttctctgtgggtacgtgcccctctgtttaaaaataaactgaatatggatgttta

SEQ ID NO: 3 - DNA, 478 bp, Homo sapien
tactatatacggtctaaggtagcgaagatctgcgggctcgtggagctcctggatgagatgaagttctcgctggagaagctgcaccaaggcatcacagtctcagaccctccctttgacacccagccccggcccgatgacagcttttcctgaggaccccggccacgcagctgttcccccacatggacagatggacacacagagcctcggcggccactgctggcacggtgtgagcgccaggcatctcccacccgcccctcccgacggcccaaccaggggctgtgcagacgtggggaccacggaaccgagatgcactttagaccagggagctggcccggcctctggcaggccccccactaacttattttgcccggctgaggttgtggggggcgcctcctggggtgcacgattccctcagctctgggtttaatgtattatatttatttggggccgacagtgccccaataaagggtcagaagtg

SEQ ID NO: 4 - DNA, 4076 bp, Homo sapien
gtccaggagcttctggccagggcatagtagttgctagggacccttttctaggtactaggggagggggctccccaacctgcgggcaggcagctgcctccacgatgtttggttttaataaagtctctttgtttccttctctgtctctctgcccctctgctttcccttctctgtccagtccctctctccccggcttctccctccttctaggcctctgcggcccctccccgccttccctcccgggctgggggcggcgccgtgacgcggcggggcgggggaaggaagggggtgtcgctgacgccgcggcggcctccggcggctccggccttttgtgcgggcggttgggtcgggtgggggcggcggccgcggaaggccaggccggtgccctgcggggacgcccagcgcagcccagccccgcgcagcccagccctgccctgccctgccctgccctgccctgcgcccggggcgcgcccaccgcgccgcatccatgttcgacaccacaccccactctggccggagcacgccaagcagctccccatcgctccggaaacggctgcagctcctgcccccaagccggcccccacctgagccagaaccaggcaccatggtggagaagggatcagatagctcctcagagaagggtggggtgcctgggacccccagcacccagagcctaggcagccggaacttcatccgcaacagcaagaagatgcagagctggtacagtatgctgagccccacttataagcagcgtaatgaggacttccggaaactgttcagcaaactccccgaagcagaacgcctcattgtggattactcctgcgccctgcagcgtgagatcctgctccagggccgcctctacctctctgagaactggatctgcttctacagcaacatcttccgctgggagaccacgatctccatccagctgaaggaagtgacatgtctgaagaaggaaaagacggccaagctgatccccaacgccatccagatctgcacggagagcgagaagcatttcttcacttcctttggggcccgtgaccgctgcttcctcctcatcttccgcctctggcagaatgcactgcttgaaaagacgctgagtccccgcgagctctggcacctggtgcatcagtgctacggctcagagctgggcctcaccagtgaggatgaggactatgtctcccccttgcagctgaacggtctggggacccccaaggaagtgggagatgtgatcgccctgagcgacatcacctcctcgggggcagctgaccgcagccaggagccaagcccagtgggttcgcgccgtggccatgtcacgcccaacctttcccgagccagcagcgacgcagaccatggggcagaggaggacaaggaggagcaggtagacagccagccagacgcctcctccagccagacagtgaccccggtggctgaacccccgagcacagagcccacccagcctgacgggcccaccaccctgggccccttggatctgctgcccagtgaggagctattgacagacacaagtaactcctcttcatccactggggaggaaggtgaggcaggcgggcccaattcattcgcctccggtacttgcaagcctcgctcagtcttaagcaagaggggatggattcgcccgcagcactgagaatccaggggcaggcgggatggcgttcaggcgctgttgctagaaatctctgtctttactctgttttgaaggcagcatggcagggtgaacacaagcacagactgaaggcagcttgccgcggttcacatcctggtcacaccacttcctgaccatgtcacgtgggcaaattatgtaacttctctgagcttgctttcctcctctgaaaatggggttaacaatgataatacccacttcataggattgttgttaagagactataaatgaggctgggtgtgatggctcacacctgtaatcccagcactttgggaggccaaggtaggaaggattgctagaggccaagagttggagaacagcctgggcagcaaagcaagaccccgttttgtacaaaaaagaaaaaaaagaaaaaactaggtgtggtggtgcacacctatagtaccagctacttggcagaccaaggcaagaggatcacatgaggccaagagtttgagacaagcctgggcaacatagtgagacccctgtctttacaaaaaatttaaaaattagccaggcatggggtcatgcaccctatgtagtctcagctactggggaggctgaggcaggaggatcgcttgagcccaggagttggaggctgcagtgagctatgattgcaccactgcacttcggcctgagcaacagagcgagaccctgtctctaaaacgaacaaagggagagaattaagtgatttcatacatttaaagcacttgggccagttagtaagcattgactattagtatttctattatcattattgtattcattttctctctccactaattttcagctagcctctattcttgtctcttatggggcagagatggcctcagccctgccccagaccagcccaatgagagagagcagcctatttttcctagtgtctacagcggacaccctagggttggctctgattgggccaacttgagagtgtgcctgcccctgaaccaatcactgtggttgatcggatagacctgggccacccactcacccctgaaccaattgctgtgcccctaggttgatgctcccaggaggcgtgctatctggtaatgaatccctgtgatttaaatctcagggcctaggtgtgttctccacccagaaccaagcacagtggctgtctgtctgggcctggagcacgtgcccaccctcaacccatccctgagtcacaggagggctctgtgtcagtgtccagctgtgctccaggaggtggggtccgcccatgcacactacaaggcctgggagtggggaggcgtggcccgcagagggagggaggagtggaggcagtcatcatcctcggctctcctctgtctccagcgggacttggctgccctgcttcccgacctctccggccgcctcctcatcaactctgtcttccatgtgggcgcagtgtcttctgagatccgctaccgaaagcagccgtggagcctggtgaagtcgctcattgagaagaactcgtggagcggcattgaagactatttccaccatctggagcgagagctcgccaaggctgagaagctgtctctggaggaaggcgggaaggatgcccggggcttgctatccggcctgcggcggcggaagcggcccctgagctggcgggctcacggggacgggccccagcacccagatcctgacccctgtgcccgggccggcattcacacctcgggctccctcagctcccgcttctccgaaccatctgtggaccagggccccggggcaggcatccccagtgccctggttctcatcagcattgtccttatcatcctcatcgccctcaacgtcctgctcttctaccgcctctggtccctggaaaggacagcccacacctttgagtcctggcacagcctggccctggccaagggcaagttcccccagacggccacagagtgggccgagatcctggcgctgcagaagcaattccacagcgtggaggtgcacaagtggaggcagatcctgcgggcctccgtggagctcctggatgagatgaagttctcgctggagaagctgcaccaaggcatcacagtctcagaccctccctttgacacccagccccggcccgatgacagcttttcctgaggaccccggccacgcagctgttcccccacatggacagatggacacacagagcctcggcggccactgctggcacggtgtgagcgccaggcatctcccacccgcccctcccgacggcccaaccaggggctgtgcagacgtggggaccacggaaccgagatgcactttagaccagggagctggcccggcctctggcaggccccccactaacttattttgcccggctgaggttgtggggggcgcctcctggggtgcacgattccctcagctctgggtttaatgtattatatttatttggggccgacagtgccccaataaagggtcagaagtg

SEQ ID NO: 5 - DNA, 2578 bp, Homo sapien
gtccaggagcttctggccagggcatagtagttgctagggacccttttctaggtactaggggagggggctccccaacctgcgggcaggcagctgcctccacgatgtttggttttaataaagtctctttgtttccttctctgtctctctgcccctctgctttcccttctctgtccagtccctctctccccggcttctccctccttctaggcctctgcggcccctccccgccttccctcccgggctgggggcggcgccgtgacgcggcggggcgggggaaggaagggggtgtcgctgacgccgcggcggcctccggcggctccggccttttgtgcgggcggttgggtcgggtgggggcggcggccgcggaaggccaggccggtgccctgcggggacgcccagcgcagcccagccccgcgcagcccagccctgccctgccctgccctgccctgccctgcgcccggggcgcgcccaccgcgccgcatccatgttcgacaccacaccccactctggccggagcacgccaagcagctccccatcgctccggaaacggctgcagctcctgcccccaagccggcccccacctgagccagaaccaggcaccatggtggagaagggatcagatagctcctcagagaagggtggggtgcctgggacccccagcacccagagcctaggcagccggaacttcatccgcaacagcaagaagatgcagagctggtacagtatgctgagccccacttataagcagcgtaatgaggacttccggaaactgttcagcaaactccccgaagcagaacgcctcattgtggattactcctgcgccctgcagcgtgagatcctgctccagggccgcctctacctctctgagaactggatctgcttctacagcaacatcttccgctgggagaccacgatctccatccagctgaaggaagtgacatgtctgaagaaggaaaagacggccaagctgatccccaacgccatccagatctgcacggagagcgagaagcatttcttcacttcctttggggcccgtgaccgctgcttcctcctcatcttccgcctctggcagaatgcactgcttgaaaagacgctgagtccccgcgagctctggcacctggtgcatcagtgctacggctcagagctgggcctcaccagtgaggatgaggactatgtctcccccttgcagctgaacggtctggggacccccaaggaagtgggagatgtgatcgccctgagcgacatcacctcctcgggggcagctgaccgcagccaggagccaagcccagtgggttcgcgccgtggccatgtcacgcccaacctttcccgagccagcagcgacgcagaccatggggcagaggaggacaaggaggagcaggtagacagccagccagacgcctcctccagccagacagtgaccccggtggctgaacccccgagcacagagcccacccagcctgacgggcccaccaccctgggccccttggatctgctgcccagtgaggagctattgacagacacaagtaactcctcttcatccactggggaggaaggacttggctgccctgcttcccgacctctccggccgcctcctcatcaactctgtcttccatgtgggcgctgagcggctccagcagatgctcttctcggactcgcccttcctccagggcttcctacagcagtgcaagttcacagacgtgaccctgagcccctggagtggggacagcaagtgccaccagcgccgggtgctgacgtacaccatccccatcagcaacccactgggccccaagagcgcctccgtggtggagacacagacgctgttccggcgcggcccccaggccggcgggtgtgtggtggactccgaggtgctgacgcagggcatcccctaccaggactacttctacactgcccaccgctactgcatcctgggtctggcccggaacaaggcgcggctccgagtgtcttctgagatccgctaccgaaagcagccgtggagcctggtgaagtcgctcattgagaagaactcgtggagcggcattgaagactatttccaccatctggagcgagagctcgccaaggctgagaagctgtctctggaggaaggcgggaaggatgcccggggcttgctatccggcctgcggcggcggaagcggcccctgagctggcgggctcacggggacgggccccagcacccagatcctgacccctgtgcccgggccggcattcacacctcgggctccctcagctcccgcttctccgaaccatctgtggaccagggccccggggcaggcatccccagtgccctggttctcatcagcattgtccttatcatcctcatcgccctcaacgtcctgctcttctaccgcctctggtccctggaaaggacagcccacacctttgagtcctggcacagcctggccctggccaagggccggcctctggcaggccccccactaacttattttgcccggctgaggttgtggggggcgcctcctggggtgcacgattccctcagctctgggtttaatgtattatatttatttggggccgacagtgccccaataaagggtcagaagtg

SEQ ID NO: 6 - DNA, 480 bp, Homo sapien
cggccgcccgggcaggtagaaaagcagcctcctagtcagacaagccagccgagaagaaggaagatgaaagccaaatggaagatcctagtgtgcggtgcagttttcaactgacctctggacgcagaacttcagccatgaaggtaacaggcatctttcttctcagtgccttggccctgttgagtctatctggtaacactggagctgactccctgggaagagaggccaaatgttacaatgaacttaatggatgcaccaagatatatgaccctgtctgtgggactgatggaaatacttatcccaatgaatgcgtgttatgttttgaaaatcggaaacgccagacttctatcctcattcaaaaatctgggccttgctgagaaccaaggttttgaaatcccatcaggtcaccgcgaggcctgactggccttattgttgaataaatgtatctgaatatccccctgttgtttccatttgctttttcct

SEQ ID NO: 7 - DNA, 2803 bp, Homo sapien
gcccttgatgtcaaagtctcccacgaaggaggcaggagcgttttgccccagtccaagtactctgtccgccaccacatcccctaccccagtaacggggagctgcattctcagtatcacggctactacgtgaagctgaacgccccccagcaccctccagtagacgtggaggacggcgatggatccagccagtcttcctcagcactggtgcacaagccatccgctaacaagtggagtccctccaaatctgtgacaaaaccagttgccaaagaaagcaaaygctgagccaaaagctaagaagtctgaacttgctataccaaagwaatccagcaagcaacgattcatgccctgctttggaaaaagaagccaattcaggccctaattcaatcatgattgtccttgtcatgctgttgaatatcgggttggccattctttttgttcactttctaacttgattggaattaggaaagtgaagtcctgacaactagtggtgtgttagcccacagttctctgcagtggtgccgtcagccctttaaatggcccaccccaggcagactcagacacagggaaggaggcttggaattaggatgggatcgcgagagagatgaaacttggaaaattcagccagaggacctgttcggttcccctgggagtgctttgtggctttggggtcctctgggagctgaagcacacggccatgttggagagcaaaacttaataataattcttttttaaaatctgctgaagcagccccatccggcgaagttcttggcattggctactccatctgtcctagcagagtgtgactaaactggaaatgtatggagctgcatttttttttttgatggaagtcaacagctgccttactattttaccatctgacgtttttagtagggagctggggaaacgactgcccgaggaatgcggtcggaggattgtgttgctgtggacgtggttccaacattcactcctatctcattagaagaaataggtagcagcatcactcaccagtcttatgccatgacctgctgctttaacatctcctggaatgttctgggagagaacgtttcgtttgcttgtgcacgactctgttcatttttgctgtttatttaaatctgatgtatagtcatctaccacctgcggtcctggccggacgaaacacacgtgttgcatctcaaggaaaagaaacaacaaaatgctagtgaaaatgtgcttattttgatagcaatataccatcttttatgtcatttattcttcctatacttgtaaaaggttatttatctttaaaatttagcaatttgaagacactatgccttcctaagaactaatttaattctaaatatttttaacattactgaggtgaattatttatgcacttaggaagtgctaaattttaaaagctgaaacacaacagaattctaagaaatatagtccaaacgttgcatggattgcagtaatcagtgtttaaaggattcagtttctttgctgacgtactttacaaccaaataaaatcttgtcggtggctgtgttaattcccatgaaagttaagcaagatgctattaataaactgctctgctctttcttgttttctttttccaacttaaatttctgttgaatacattcaggtagaacataaagccttgttcaatcactgcctctcagttttctgcctttcctgtttttcaaagtccttttgtaatttcatttcacattttaaaggcttagacatttttattttaaatatgtgtcttttacagtcttttgtcattctgacatttctggatttttgctgttttataatttaccctttgttattcagaagcatgcttacttatagaaactaaatggtctttataaaagtaattacttaaaaagaaatcaggggaagaaagatatctatctaatctattaaatctttataaaacattacattgcagagggggagctactcctaaatattttcatgatttgcatggtttaatcagattttttttttttttacaccatattagctaccttttcaatggagaagagacagttcacacaattccctggttagcacagatgtggactgagtgctttgtcacctgcagggtagtaacccagtgatgtttcttacagaagcacaatatgttgaaaatcctgggtgtgaccaatatggaataaagaagaaggcagaaagagagcaaatgaaaaatttcaacttgtatattcattttttacattttgctttgacttttaaatttaggaagtccgtttttacctgagaacaaatgtttaaagttcctgcgtcactctcagtactctcactgcccctcccaaaccctatagctccttacgctgggaaagctggttttttaaaaaaataataataaaatatttaatcttattaagtgttcatttaaaatgcgtaatgctttggaaataatgggtaacagatagcgagaggatatgtttataaagtgagcatgttggtcccatttataaatatatgtatgatttataagcttttttaaaacaaagctcaaattgttggtatttttctaaaatgtgcacagctgtattttacatgaaggctctttctaatgggttgttatactgtactcaacattttggacagcacatgaagtctgccaatgtacttaataaaacatgactttgtttatttaaagtttcttgctgtgaaaaagaactccctacctgtgagttcctttatttataattcttgaaaccaaaatgtataatgtacagttttcacaactgtatctgctctaataaaaaaaagttggttattaaaaaaaaaaaa

SEQ ID NO: 8 - DNA, 891 bp, Homo sapien
gattctcttaatttccaccgctacagatgtacatgtacatccagacaacaacacttactgtctccatgagtttaagtgcttcagtatctctgggcatgctctatatgcccaaggtttatattataatttttcatccagaacagaatgttcaaaaacgcaagaggagcttcaaggctgtggtgacagctgccaccatgcaaagcaaactgatccaaaaaggaaatgacagaccaaatggcgaggtgaaaagtgaactctgtgagagtcttgaaaccaacacttcctctaccaagacaacatatatcagttacagcaatcattcaatctgaaacagggaaatggcacaatctgaagagatgtggtatatgatcttaaatgatgaacatgagaccgcaaaaattcactcctggagatctccgtagactacaatcaatcaaatcaatagtcagtcttgtaaggaacaaaaattagccatgagccaaaagtatcaataaacggggagtgaagaaacccgttttatacaataaaaccaatgagtgtcaagctaaagtattgcttattcatgagcagttaaaacaaatcacaaaaggaaaactaatgttagctcgtgaaaaaaaatgctgttgaaataaataatgtctgatgttattcttgtatttttctgtgattgtgagaactcccgttcctgtcccacattgtttaacttgtataagacaatgagtctgtttcttgtaatggctgaccagattgaagccctgggttgtgctaaaaataaatgcaatgattgatgcatgcaattttttatacaaataatttatttctaataataaaggtcgcaggcgaccagatctttctatccacatttcctatcaatacctccacaattatcta

SEQ ID NO: 9 - DNA, 3733 bp, Homo sapien
gtgtgctggaaaggcgtgcccccgctgggcttcttcaccgcgccctctgcggggagcagggaataattctgctacaaggctgatttcaaggacatgaattgttgacctcatcccaacatcagaacctcagatgttctaatttttgcaccattccaggcaagttgatcttataaggaaataaaattgaaccttaggggtctgatggaaattcactgtgacattcaaatcaagaaaacttgctaatgcccacagagccttttccccatgggccctgatggtagcctccagaaggtgcagcctcaggtggtgccctttctgctgtgttgcaagaataaactttgggtcttggattgcaataccacctgtggagaaaatggtatgcgagggaaagcgatcagcctcttgcccttgtttcttcctcttgaccgccaagttctactggatcctcacaatgatgcaaagaactcacagccaggagtatgcccattccatacgggtggatggggacattattttggggggtctcttccctgtccacgcaaagggagagagaggggtgccttgtggggagctgaagaaggaaaaggggattcacagactggaggccatgctttatgcaattgaccagattaacaaggaccctgatctcctttccaacatcactctgggtgtccgcatcctcgacacgtgctctagggacacctatgctttggagcagtctctaacattcgtgcaggcattaatagagaaagatgcttcggatgtgaagtgtgctaatggagatccacccattttcaccaagcccgacaagatttctggcgtcataggtgctgcagcaagctccgtgtccatcatggttgctaacattttaagactttttaagatacctcaaatcagctatgcatccacagccccagagctaagtgataacaccaggtatgactttttctctcgagtggttccgcctgactcctaccaagcccaagccatggtggacatcgtgacagcactgggatggaattatgtttcgacactggcttctgaggggaactatggtgagagcggtgtggaggccttcacccagatctcgagggagattggtggtgtttgcattgctcagtcacagaaaatcccacgtgaaccaagacctggagaatttgaaaaaattatcaaacgcctgctagaaacacctaatgctcgagcagtgattatgtttgccaatgaggatgacatcaggaggatattggaagcagcaaaaaaactaaaccaaagtgggcattttctctggattggctcagatagttggggatccaaaatagcacctgtctatcagcaagaggagattgcagaaggggctgtgacaattttgcccaaacgagcatcaattgatggatttgatcgatactttagaagccgaactcttgccaataatcgaagaaatgtgtggtttgcagaattctgggaggagaattttggctgcaagttaggatcacatgggaaaaggaacagtcatataaagaaatgcacagggctggagcgaattgctcgggattcatcttatgaacaggaaggaaaggtccaatttgtaattgatgctgtatattccatggcttacgccctgcacaatatgcacaaagatctctgccctggatacattggcctttgtccacgaatgagtaccattgatgggaaagagctacttggttatattcgggctgtaaattttaatggttgccgaagagggatccagatgtctctaccctggccaactctttttactccttcattttccagtagttgggcagtgctggcactcctgtcacttttaatgaaaacggagatgctcctggacgttatgatatcttccagtatcaaataaccaacaaaagcacagagtacaaagtcatcggccactggaccaatcagcttcatctaaaagtggaagacatgcagtgggctcatagagaacatactcacccggcgtctgtctgcagcctgccgtgtaagccaggggagaggaagaaaacggtgaaaggggtcccttgctgctggcactgtgaacgctgtgaaggttacaactaccaggtggatgagctgtcctgtgaactttgccctctggatcagagacccaacatgaaccgcacaggctgccagcttatccccatcatcaaattggagtggcattctccctgggctgtggtgcctgtgtttgttgcaatattgggaatcatcgccaccacctttgtgatcgtgacctttgtccgctataatgacacacctatcgtgagggcttcaggacgcgaacttagttacgtgctcctaacggggatttttctctgttattcaatcacgtttttaatgattgcagcaccagatacaatcatatgctccttccgacgggtcttcctaggacttggcatgtgtttcagctatgcagcccttctgaccaaaacaaaccgtatccaccgaatatttgagcaggggaagaaatctgtcacagcgcccaagttcattagtccagcatctcagctggtgatcaccttcagcctcatctccgtccagctccttggagtgtttgtctggtttgttgtggatcccccccacatcatcattgactatggagagcagcggacactagatccagagaaggccaggggagtgctcaagtgtgacatttctgatctctcactcatttgttcacttggatacagtatcctcttgatggtcacttgtactgtttatgccattaaaacgagaggtgtcccagagactttcaatgaagccaaacctattggatttaccatgtataccacctgcatcatttggttagctttcatccccatcttttttggtacagcccagtcagcagaaaagatgtacatccagacaacaacacttactgtctccatgagtttaagtgcttcagtatctctgggcatgctctatatgcccaaggtttatattataatttttcatccagaacagaatgttcaaaaacgcaagaggagcttcaaggctgtggtgacagctgccaccatgcaaagcaaactgatccaaaaaggaaatgacagaccaaatggcgaggtgaaaagtgaactctgtgagagtcttgaaaccaacacttcctctaccaagacaacatatatcagttacagcaatcattcaatctgaaacagggaaatggcacaatctgaagagatgtggtatatgatcttaaatgatgaacatgagaccgcaaaaattcactcctggagatctccgtagactacaatcaatcaaatcaatagtcagtcttgtaaggaacaaaaattagccatgagccaaaagtatcaataaacggggagtgaagaaacccgttttatacaataaaaccaatgagtgtcaagctaaagtattgcttattcatgagcagttaaaacaaatcacaaaaggaaaactaatgttagctcgtgaaaaaaaatgctgttgaaataaataatgtctgatgttattcttgtatttttctgtgattgtgagaactcccgttcctgtcccacattgtttaacttgtataagacaatgagtctgtttcttgtaatggctgaccagattgaagccctgggttgtgctaaaaataaatgcaatgattgatgcatgcaattttttatacaaataatttatttctaataataaaggtcgcaggcgaccagatctttctatccacatttcctatcaatacctccacaattatcta

SEQ ID NO: 10 - DNA, 1375 bp, Homo sapien
gtgtgctggaaaggcgtgcccccgctgggcttcttcaccgcgccctctgcggggagcagggaataattctgctacaaggctgatttcaaggacatgaattgttgacctcatcccaacatcagaacctcagatgttctaatttttgcaccattccaggcaagttgatcttataaggaaataaaattgaaccttaggggtctgatggaaattcactgtgacattcaaatcaagaaaacttgctaatgcccacagagccttttccccatgggccctgatggtagcctccagaaggtgcagcctcaggtggtgccctttctgctgtgttgcaagaataaactttgggtcttggattgcaataccacctgtggagaaaatggtatgcgagggaaagcgatcagcctcttgcccttgtttcttcctcttgaccgccaagttctactggatcctcacaatgatgcaaagaactcacagccaggagtatgcccattccatacgggtggatggggacattattttggggggtctcttccctgtccacgcaaagggagagagaggggtgccttgtggggagctgaagaaggaaaaggggattcacagactggaggccatgctttatgcaattgaccagattaacaaggaccctgatctcctttccaacatcactctgggtgtccgcatcctcgacacgtgctctagggacacctatgctttggagcagtctctaacattcgtgcaggcattaatagagaaagatgcttcggatgtgaagtgtgctaatggagatccacccattttcaccaagcccgacaagatttctggcgtcataggtgctgcagcaagctccgtgtccatcatggttgctaacattttaagactttttaagatacctcaaatcagctatgcatccacagccccagagctaagtgataacaccaggtatgactttttctctcgagtggttccgcctgactcctaccaagcccaagccatggtggacatcgtgacagcactgggatggaattatgtttcgacactggcttctgaggggaactatggtgagagcggtgtggaggccttcacccagatctcgagggagattggttatccatccctgtttgggattcagggctgccttcatgaatgttttgctatactatgtcaagttgtttaccaatttctgcttctaatgcagctgtcagatgctcaaactgtctattagtcgaagaggctctctactgaccacctttctcaagtttcttcttcttacatacaatgtttttgacaagactaagcatatcaaaccatcttttaacaattgtaaagcctaatattggccagcatacaattcaattcattaaacattgtagcactgaaa

SEQ ID NO: 11 - DNA, 2905 bp, Homo sapien
gctaaagcacccagagggactagacagactctggctagaggcacttgtcctgaaatctgattcctgcctgatgatggtgtctcttgtatcaatctctctctctggtctttgaattggatagaaattataacccagcttcatcgttctccaagtttggaaatccttctgtgtgagtattaagggcatcactttgaagaaaggacaaatgttctcgatggttgatttggaagagtacctttatggtagtgtttctcagtggggacaatttgtcctccccttcccactctgggataatctggcaatgtctggagacattctgggttctcacaaataggaggaggatgccactggcatctagtaggtcagcgatgctgctaagcatcctgcagtgcccaggacagccccacaaagactcatccagcctgaatgtcaatagtgctgaggtcgaggagccttactttacgggaactaggcaggaggagtctgtatgcccaaggacgttggtcattatcacgtgtccacttcagtacagcactactcagaggcaatgctttttgggtaacggatttttctcttaacaggttcttcattttgaaaatgtcaaagatgtaccctttggatttcaaacagtaacatcggatgtaaacaaacttagttccttttactcactgaaactaatcaagcggctctacgtagacaaatctctgaatctttctacagagttcatcagctctacgaagagaccctatgcaaaggaattggaaactgttgacttcaaagataaattggaagaaacgaaaggtcagatcaacaactcaattaaggatctcacagatggccactttgagaacattttagctgacaacagtgtgaacgaccagaccaaaatccttgtggttaatgctgcctactttgttggcaagtggatgaagaaatttcctgaatcagaaacaaaagaatgtcctttcagagtcaacaagacagacaccaaaccagtgcagatgatgaacatggaggccacgttctgtatgggaaacattgacagtatcaattgtaagatcatagagcttccttttcaaaataagcatctcagcatgttcatcctactacccaaggatgtggaggatgagtccacaggcttggagaagattgaaaaacaactcaactcagagtcactgtcacagtggactaatcccagcaccatggccaatgccaaggtcaaactctccattccaaaatttaaggtggaaaagatgattgatcccaaggcttgtctggaaaatctagggctgaaacatatcttcagcgaagacacatctgatttctctggaatgtcagagaccaagggagtggccctatcaaatgttatccacaaagtgtgcttagaaataactgaagatggtggggattccatagaggtgccaggagcacggatcctgcagcacaaggatgaattgaatgctgaccatccctttatttacatcatcaggcacaacaaaactcgaaacatcattttctttggcaaattctgttctccttaagtggcatagcccatgttaagtcctccctgacttttctgtggatgccgatttctgtaaactctgcatccagagattcattttctagatacaataaattgctaatgttgctggatcaggaagccgccagtacttgtcatatgtagccttcacacagatagaccttttttttttttccaattctatcttttgtttccttttttcccataagacaatgacatacgcttttaatgaaaaggaatcacgttagaggaaaaatatttattcattatttgtcaaattgtccggggtagttggcagaaatacagtcttccacaaagaaaattcctataaggaagatttggaagctcttcttcccagcactatgctttccttctttgggatagagaatgttccagacattctcgcttccctgaaagactgaagaaagtgtagtgcatgggacccacgaaactgccctggctccagtgaaacttgggcacatgctcaggctactataggtccagaagtccttatgttaagccctggcaggcaggtgtttattaaaattctgaattttggggattttcaaaagataatattttacatacactgtatgttatagaacttcatggatcagatctggggcagcaccctataaatcaacaccttaatatgctgcaacaaaatgtagaatattcagacaaaatggatacataaagactaagtagcccataaggggtcaaattttgctgccaaatgcgtatgccaccaacttacaaaaacacttcgttcgcagagcttttcagattgtggaatgttggataaggaattatagacctctagtagctgaaatgcaagaccccaagaggaagttcagatcttaatataaattcactttcatttttgatagctgtcccatctggtcatttggttggcactagactggtggcaggggcttctagctgactcgcacagggattctcacaatagccgatatcagaatttgtgttgaaggaacttgtctcttcatctaatatgatagcgggaaaaggagaggaaactactgcctttagaaaatataagtaaagtgattaaagtgctcacgttaccttgacacatagtttttcagtctatgggtttagttactttagatggcaagcatgtaacttatattaatagtaatttgtaaagttggttggataagctatccatgttgcaggttcatggattacttctctataaaaaatatgtatttaccaaaaaattttgtgacattccttctcccatctcttccttgacatgcattgtaaataggttcttcttgttctgagattcaatattgaatttctcctatgctattgacaataaaatattattgaactaca

SEQ ID NO: 12 - DNA, 6682 bp, Homo sapien
aatttataagattcatagaaatagacaatgcaaagagttccctgaggacaggaaccacatctgtattgttcacttctgtaacccagtgctttgcccatattagatgcccagaaaataacaattgagtttatgaatgacctctgatatctctacatccttaattcagtcttatttttatccactaaaatcatgagattagtgaaattgtttaagcacgtaaggatagttttactgttaatttagattttaccaataagcaagagtagtactattgctggatttatatgggtttgatataattttataatccaaaagaaagattggaaagggatgacaagttggttaattcattcttaactgaaagatagtggatagcatagcacataaaagcactggactctggagtaaaactgcctgtatttcagtctcggctatgtgatcttggtcaagttaccttacctctttgtgtattagctttcacatgtaaaatgggaatggcagtaataacacttccttataaggtataatattgtacattttgtgaggattaaatgagttaatacaaatataacactatattattatattgatgttgttagatgttattattgaaattgctaaattatttgatagttttacccaaagttgagattagtcttgatcacttataaataatttttatcttcatgattaggcttttcagaattctttagctcatcattaatgactgttattctcatagcattggaggcgttgtactggtaaacctggcagggtctgaaaaacctgctggaagagacacagtaggttccatttggtctcttgctggagccatgctctatgctgtctatattgttatgattaagagaaaagtagatagagaagacaagttggatattccaatgttctttggttttgtaggtttgtttaatctgctgctcttatggccaggtttctttttacttcattatactggatttgaggacttcgagtttcccaataaagtagtattaatgtgcattatcattaatggccttattggaacagtactctcagagttcctgtggttgtggggctgctttcttacctcatcattgataggcacacttgcactaagccttacaatacctctgtccataatagctgacatgtgtatgcaaaaggtgcagttttcttggttattttttgcaggagctatccctgtatttttttcattttttattgtaactctcctatgccattataataattgggatcctgtgatggtgggaatcagaagaatatttgcttttatatgcagaaaacatcgaattcagagagttccagaagacagcgaacagtgtgagagtctcatttctatgcacagtgtttctcaggaggatggagctagttagctgtctgttgtctgtagcccagcttgataatggaactatacagcgaagagacaatctctggcaagtttttgtagaaaaaatgtttcagtgcctagtctgaaaaataacagtttgagttctttgaaactctaaaatatatttttctcatacctgttttcttcattttcataatgaagcactttgctatgtagctgtgtacatatcactacagttataggaagtttcagtctacagtccatccaaaggaccaacctgccttacacatctcaaggaattcagctgttgaaatcatttgaactaatcaaggaataaatcctaatgttctgggactttattttcacatgttaaatgctggaatatattatgaaaatgttttcaagaaatcacttaagtgttcatagaccagtatttctgacaggtaaaatgctaaaataagctacctgtaataagtgtggattatatttttgggttttgtagaatattgcaaattaaccacacaaaaaatgtttaatttatgcaacaagcatgtttgtgcaaatttcatgggactttaaaaagaataagtatttgagaaaatatctggttcacttacactacatttactgtattattcttttatagcattaggtgccttgtattttaaatctgtgacaaaccatggcaaatttttaaaggggaagtattattataaaatgaagaaatatgtatttctaaaggctatattgctgtaaacttaattgataaagctctgtttaatttagagttttgaagaaatagtctcccttcaattaagaaattttcataatggaatgatttaaattgaagtgacaaagagtattattaaaatacaatgtttatacgtctatttgtgtattgtagatgtatcaagtgatttctaatttttttcacatatgaatgtgccagattactctagaactagatgtctcttctttaaataattttagttttcctgaataaatttgtaatggttaaagtaccaagtaagtaaggcgagaagggattctgtttttaaaatcacatcagaacttttcctctactaagattataaattaaatgtaaaatactcctaattgcaattcttaaacttaggccttacatgtacttattatgcaactgctcctggactctattcaccatagatatcagtaaacgtatgtcccaggattcacaggcttttgattaatcaatattcttttcaagtttgctgtgaagagtttagttctcttcaaaatttcttaactaatctgatttttaagaattctctttgcagtgtttagcttcctattcacattcttaaaattgctttggtgttaccatgagtctaaaatgaagtttagccttccttttgtttcattctgagaacttctatattatattacctttaaaaattgtttatgatattaaatttaaaatacaaacagctctctttttttttttttttttttttaatcatccagcccaaagtggcaaaaacagctcttttctcatttggcaccaccaataacgcaagttaaaaataatgttgagtttattatacttttgacctgtttagctcaacagggtgaaggcatgtaaagaatgtggacttctgaggaattttcttttaaaaagaacataatgaagtaacattttaattactcaaggactacttttggttgaagtttataatctagatacctctactttttgtttttgctgttcgacagttcacaaagaccttcagcaatttacagggtaaaatcgttgaagtagtggaggtgaaactgaaatttaaaattattctgtaaatactatagggaaagaggctgagcttagaatcttttggttgttcatgtgttctgtgctcttatcatcacacaggtcatgtgttgttactcaggattctggaagtactaagccgtagttaacaggctggatagatcttcagccaatcttctttcattatactgctgcttttctgtttcttaaaaaacaaaaatcaatgaacaacttctttagaaggaagcaccactgttcaattggttaactgaaagtatgaatcactgccgctttgcttgcccacctgtttgctttttctcacaggttttatttatctgaatgattgttgcatttgaatactgtagccatggtgagtgagcagttgaagacttcctttctgcaccttcatagttaagggttcatcttctcaagaaataaagttgtgctgggttgtttcaattctgtagatcacctagaaactaggtaacaaggcccttggatcacaatgagcacattgcaggtctttggaaatgctgggaaggggttacattcaagtaactgctgacgtccttcctctctgtcagacccatgttggcctgtaattatatttttctgaatctaaaaacaaatagaaatttctgatatcttttcagtctccttcttttctttccattcatcacttaaatctcattattgtataacgtttcaaattatgacctggattgaaggaagtctgttttgtcagggactttgttaggtgaacatcagaatctcaactacaacaaagctgaaaaatgaggcagccttaacagtaaatgctggctaaaaccaattctttagattgtttttgccaccatttgcttacttggaatagctttcacatttatttttcttatgaagaaatccagtgtcagtcagaccatgtaacatcaaagcaaaatttcattgaagcctatccttgtcttaattattctaaaataaagtacaataaagtgaattattttgccctttgtagtagcatagtgttaagttatatatatattttaatatgcatactcctaagtaaagtttcagagaccacatgctggagagcagtggctttcagacagcatcagcatcacctgaaggccttgttgaatacacattattggaagagaggggagaacacaggctcatgcctgtaattccagtgctttgggagactgaggcgggaggatcacgtgagcccaggagttcaagatcaggctgggcaatacagcaagacccctgtctctacaaaaacaaaaacaaaaaacaaacaggcatggtagtgcatacctgtagtctgagctgcttgggagtctgaggcaggaggatcacttgaacccaggagttcgaggctgcagtgagttattattgggccactgcagtccagcctgggcagcaaagtgagaccctgtctgttaaaaaaacaaaaccaaaaacttgattgctgggggccaccctagagtttctgattcagtaggtctggcggtggggatggtgggcctggtaatttgcctttctaacaagcgtccaggtaatgccccagctgctggtcccaggaccacactttgcagattattactctgagaagagcactaactctgacgttggattccttctgttcctcattagtgaatttatttgggggagattattcaatctggtagatccgcatttacttagctgtgaagtggaggttaatgcaacctgcctgagactgtgagaatgagaaactctaattgaaataccaggcccagcgtgcctggatgcttgaaaaatgctgactcccatggtccgtccttccctcactcttctcagctataaagtgaggagcgaaattcagtatcttttaagattcctctcaggtgtaaaatgctgtgattctaaaagtttaattttgtagttccagagacaatgccaaacacctgtgtgtgcttagtgctttgtaaagagtggtaataacagtgacaccacataggccgtagttttgtagttccagagacaatgccaaacacctgtgtgtacttagtgctttgtaaagagtgaataacagtgacaccacataggccatagttttgtagttccagagacaatgccaaacacctatgtgtacttagtgctttgtaaagagtggtaataacagtgacaccacataggccgtaattttgtttttgcttttgttagggtgttcagcatcttgactccttaaataaggttttcagtcagatttataaagcagcattgaagaagttgtattatatttgagtacagttggaatccatggcagttttatggaggccaaatatatcagatgaataggctaatttccctgagttgctggccttattagtccctactctgttgccccctggttacctaatgcatgttcaaaaggtatagttttcatcacctgcttgatcttgattttcagacagagcactttgggagtccgaggcgggtggatcacctgagattaggagttcaagaccagtgtgaccaacatggagaaaccccttctctactaaaaatacaaaaaattagccaggcatggtggtgcacgcctgtggtcccagctacttgtgaggctgaggtaggagaatcgcttgaacccaagaggcagaggttgcagtgggctgagatcacaccactgcactccagcctgggtgacagagcgagaccctgtttcaaaaaaataagaaataaaaagtgagtcttcatattcaaattagtatatgaggttaggcaacaattcttatatgggaccaggtatatttaatttgcctttctttgcagtcatcctagtaaatccttgtaaagggttattttatatacaattttgtagtatattctaaatcccctttggcaaataaagctgaagttatctagtgtcagcatactgtgatttgtatatttatataagacaagattgcatcattctgattaagttgcagcattttagttttatctgataggcctgtattgagtaatcagtagctatgtgcaaatattaagtcaacttaattaccagacccagaaggccagaggtaatcaaagagtactttcggaagatgaaatatttataatgagttatggaaacaatgttttagaaatgtttttcttggtgtaatttaatgcagatttttacctcaattttgttaaaaaacttgataatttgatccctccatctatttaatatttaatattttcagattctagagtatttaaaatttaaacacaattataaaattaattataattcctacttatgttagctatgatttagggccaaaactaccctggttttgtcttgcaacttgaaacattgtgtattttaaactatataatttgggaacattattttatagactgtggataaccaaatataagatttgtgatttttaatgcttcatttgtgtaaaatcatttgtatattctatttatagtatgcattttctagctcattaaaagtacagaaaaacctcaaa

SEQ ID NO: 13 - DNA, 2992 bp, Homo sapien
ggcggaggtttagccactccctcgtcctttgctctgccccagacacccacgctcgctttcctcttcttcctccacctcgccctacttcccttcttcctatcttctctcttctttcgcctcgccgccgcgagccctcgctcggcgcccagagcctcgcattacttcccctagctccgccaagcctcgctgcatacgcgcccgcgcgcagtccgccgtcgcgcccctatgacgtcacccgcgcgccaccgcttccgggctggggactgggggcggggccgcgcggagggcaagccgggggcggggccggggccagagcagatctccgggcctccgcggccatagctgactgtgccgtcccttcccctcacccgctccacgccctcctgggccgagtggagttgggtggtgtcgggagcctctccctgaggggcaccgcgtcttcaggagctgggcctccagtgcggcgcgatgtcaggcgcggtgacagctctgtgagtccgaggccgcggccgtggcgctgggcggctgcggggcctgaccggtccgctcatggtgccgccacgacgccatcgcggggcaggaaggccaggggtgctgagttcttcacctccttttagactgagatctgccaagttttccggcattgctcttgaggatctcagaagggctcttaagacaagactgcaaatggtgtgtgtatttgtcatgaaccgaatgaattcccagaacagtggtttcactcagcgcaggcgaatggctcttgggattgttattcttctgcttgttgatgtgatatgggttgcttcctctgaacttacttcgtatgtttttacccagtacaacaaaccattcttcagcacctttgcaaaaacatctatgtttgttttgtaccttttgggctttattatttggaagccatggagacaacagtgtacaagaggacttcgcggaaagcatgctgctttttttgcagatgctgaaggttactttgctgcttgcacaacagatacaactatgaatagttctttgagtgaacctctgtatgtgcctgtgaaattccatgatcttccaagtgaaaaacctgagagcacaaacattgatactgaaaaaacccccaaaaagtctcgtgtgaggttcagtaatatcatggagattcgacagcttccgtcaagtcatgcattggaagcaaagttgtctcgcatgtcatatcctgtgaaagaacaagaatccatactgaaaactgtggggaaacttactgcaactcaagtagcgaaaattagcttttttttttgctttgtgtggtttttggcaaatttgtcatatcaagaagcactttcagacacacaagttgctatagttaatattttatcttcaacttccggactttttaccttaatccttgctgcagtatttccaagtaacagtggagatagatttaccctttctaaactattagctgtaattttaagcattggaggcgttgtactggtaaacctggcagggtctgaaaaacctgctggaagagacacagtaggttccatttggtctcttgctggagccatgctctatgctgtctatattgttatgattaagagaaaagtagatagagaagacaagttggatattccaatgttctttggttttgtaggtttgtttaatctgctgctcttatggccaggtttctttttacttcattatactggatttgaggacttcgagtttcccaataaagtagtattaatgtgcattatcattaatggccttattggaacagtactctcagagttcctgtggttgtggggctgctttcttacctcatcattgataggcacacttgcactaagccttacaatacctctgtccataatagctgacatgtgtatgcaaaaggtgcagttttcttggttattttttgcaggagctatccctgtatttttttcattttttattgtaactctcctatgccattataataattgggatcctgtgatggtgggaatcagaagaatatttgcttttatatgcagaaaacatcgaattcagagatggaatcttgctctgtcgcccaagctggagtgcagtggcgagatctcgggtcactgcaacctctacctcctgggctcaagcgattctcctgcctcagcctcccgagtagctgggactacaggcgcacgccaccacacccagctaatttttgtatttttagtagagacggggtttcaccatgttggtcaggatggtctcgatctcttgaactcgtgatccgccctccttggcttcccaaagtgctgggattataggcgtgagccaccgcgcccggcccacagcatcatttttcaagggtctctagggtgaccaggtgtccgggtttgccaaggacagtcccagtttctacctgctgtcctaggacaatcatgaatagtgcccctttcagtttcaaaagtgtcatagtttagacattaaattacctgaccacccttatatgccccatgtttcttaacatctaggctgctgacaaaattcacattttctgactgtcagtctagtgttctctatactagactgatacggatccacaaaggaagcaatattggccaacaattaatcttcagtctttggattagtgagaggtgacaacgtgctggcagccgtcacagccctcgctcactctccccgcctcctctgcctggtttcccagtttgacggcacttgaggagcccttcagcccgccgctgcactgtgggagccccttcctgggctggccgaggccggaggcggctcccccagcttgcggggaggtgtggagggagaggcgagggcgggaacaggggctgcgcgcggtgcttgcgggccagcgcgagttctgggtgggtgtgggctcggcgggccccgcactcggagcggccggcaggccctgccggccccgggcaatgaggggcttagcacccgggccagcggctgcggagggtgtgccgggtcccccagcagtgcc

SEQ ID NO: 14 - DNA, 717 bp, Homo sapien
aatcactataggcgcattggtgctctagatgctgctcgagcggcgcagtgtgatggatgtggtcgcggccgaggtgtctgtttgactttacgcccatctcaggacacttccgtagactgtttaggttcccctgtcaaatatcagttacccactcggtcccagttttgttgccccagaaagggatgttattatccttgggggctcccagggcaagggttaaggcctgaatcatgagcctgctggaagcccagcccctactgctgtgaaccctggggcctgactgctcagaacttgctgctgtcttgttgcggatggatggaaggttggatggatgggtggatggccgtggatggccgtggatgcgcagtgccttgcatacccaaaccaggtgggagcgttttgttgagcatgacagcctgcagcaggaatatatgtgtgcctatttgtgtggacaaaaatatttacacttagggtttggagctattcaagaggaaatgtcacagaagcagctaaaccaaggactgagcaccctctggattctgaatctcaagatgggggcagggctgtgcttgaaggccctgctgagtcatctgttagggccttggttcaataaagcactgagcaagttgagaaaaacaacaaccacaacacaaaataaaagctcttttttttcttcttttttgggcaaaaaggcccttttttttcgggaaagggttt

SEQ ID NO: 15 - DNA, 440 bp, Homo sapien
aatcactataggcgcattggtgctctagatgctgctcgagcggcgcagtgtgatggatgtggtcgcggccgaggtctggggcctgactgctcagaacttgctgctgtcttgttgcggatggatggaaggttggatggatgggtggatggccgtggatggccgtggatgcgcagtgccttgcatacccaaaccaggtgggagcgttttgttgagcatgacagcctgcagcaggaatatatgtgtgcctatttgtgtggacaaaaatatttacacttagggtttggagctattcaagaggaaatgtcacagaagcagctaaaccaaggactgagcaccctctggattctgaatctcaagatgggggcagggctgtgcttgaaggccctgctgagtcatctgttagggccttggttcaataaagcactgagcaagttgagaaa

SEQ ID NO: 16 - DNA, 4387 bp, Homo sapien
ggcacgaggaagacaaaaaaaaaataagcgtaacttccctcaaagcaacaacccccccccccacccctcgcccgctgcctccctcggcccagccagctgtgccggcgtttgttggctgccctgcgcccggccctccagccagccttctgccggccccgccgcgatggaggtgccccagccggagcccgcgccaggctcggctctcagtccagcaggcgtgtgcggtggcgcccagcgtccgggccacctcccgggcctcctgctgggatctcatggcctcctggggtccccggtgcgggcggccgcttcctcgccggtcaccaccctcacccagaccatgcacgacctcgccgggctcggcaggtaggacaccccaaggaggctgcatatgggggtgagaggctaggtctggagtcctgggcctcctggagaactgggcatggtagtcgaatccaggaggtggagtccggggaggcatcctgagcagtggagaggtacgcccttgttccctcctaggggcccaggacatgggaagtgagacctgggctgtgccccccacacctccaggtgacctgctctcagtctgcacaagcctctccaaatcttctttcccctcactccctcctccctcattgtgcctccaccacgctgcctccgtaatctctgcccggatagccaccattttgccccaggatgggaatctcaagcctggagagggaacttaagggtggcagagccgtggagcactcacacatccatgcccctgctccctccaccccagttctgcccccagaattaagacaattaattaaacactgatcctgctccctaagtctgcaaggggagagctgggttgttccagtaggagaacctggtcttggtccatccttcaggaagggtcctggaaaggtgggggtctgacagtttaggggaaggctctctggggcggctctgctagaccaccaacccttaggctggcctccagccaggcagccttgctcacaccctgggctcaccttgccctgctcctgagaggacctttcctaaaccagtcaacgaagagaagacgctttagggcctctgtagaatgaaccttccttgacctgagaagagggggccctcagggccattgctttcccggtgtagtgtttcgctcagttcttttctcagcaagggagtgggaacgtgggctagccaggccttgagccccacgtttacctttctcctttcccgggtccctgttcccttcccagcgaaaccccaaagagtcaggtagggaccctgctcttccgcagccgcagccgcctgacgcacctatccctgtctcgacgggcatccgaatcctccctgtcgtctgaatcctccgaatcttctgatgcaggtctctgcatggattcccccagccctatggacccccacatggcggagcagacgtttgaacaggccatccaggcagccagccggatcattcgaaacgagcagtttgccatcagacgcttccagtctatgccggtgaggctgctgggccacagccccgtgcttcggaacatcaccaactcccaggcgcccgacggccggaggaagagcgaggcgggcagtggagctgccagcagctctggggaagacaaggagaatgtgcgcttctggaaggccggggtgggagctctccgggaagaggagggggcatgctggggtggttccctggcatgtgaggaccctcctctcccatcttggctgcaggatggatttgtcttcaagatgccatggaagcccacacatcccagctccacccatgctctggcagagtgggccagccgcagggaagcctttgcccagagacccagctcggcccccgacctgatgtgtctcagtcctgaccggaagatggaagtggaggagctcagccccctggccctaggtcgcttctctctgacccctgcagagggggatactgaggaagatgatggatttgtggacatcctagagagtgacttaaaggtaaacagccttgtcccaccaggcccctaccttcctatccctgggttcgcccaaaagaagagagctctgagcccttgtggcaggaccatgatgtcattccagtgtcagaagaagaatctgaggtaactgagtcacagcctaacctctggccaatgagagaagaacaggtggctggtgccacagtggagggcggtttgggaggtaggggagcttctcaccccaacctggagtttgccagggaaacagggaaggctgtgctggaggattccgggactggaggggtttggcctatgcctgtgggttgtgaccctgtccttgctaatctggcctcagatgatgatgcagttcccccaggcatggagagtctcattagtgccccactggtcaagaccttggaaaaggaagaggaaaaggacctcgtcatgtacagcaagtgccagcggctcttccgctctccgtccatgccctgcagcgtgatccggcccatcctcaagaggctggagcggccccaggacagggacacgcccgtgcagaataagcggaggcggagcgtgacccctcctgaggagcagcaggaggctgaggaacctaaagcccgcgtcctccgctcaaaatcactgtgtcacgatgagatcgagaacctcctggacagtgaccaccgagagctgattggagattactctaaggccttcctcctacagacagtagacggaaagcaccaagacctcaagtacatctcaccagaaacgatggtggccctattgacgggcaagttcagcaacatcgtggataagtttgtgattgtagactgcagatacccctatgaatatgaaggcgggcacatcaagactgcggtgaacttgcccctggaacgcgacgccgagagcttcctactgaagagccccatcgcgccctgtagcctggacaagagagtcatcctcattttccactgtgaattctcatctgagcgtgggccccgcatgtgccgtttcatcagggaacgagaccgtgctgtcaacgactaccccagcctctactaccctgagatgtatatcctgaaaggcggctacaaggagttcttccctcagcacccgaacttctgtgaaccccaggactaccggcccatgaaccacgaggccttcaaggatgagctaaagaccttccgcctcaagactcgcagctgggctggggagcggagccggcgggagctctgtagccggctgcaggaccagtgaggggcctgcgccagtcctgctacctcccttgcctttcgaggcctgaagccagctgccctatgggcctgccgggctgagggcctgctggaggcctcaggtgctgtccatgggaaagatggtgtgggtgtcctgcctgtctgccccagcccagattcccctgtgtcatcccatcattttccatatcctggtgccccccacccctggaagagcccagtctgttgagttagttaagttgggttaataccagcttaaaggcagtattttgtgtcctccaggagcttcttgtttccttgttagggttaacccttcatcttcctgtgtcctgaaacgctcctttgtgtgtgtgtcagctgaggctgggggagagccgtggtccctgaggatgggtcagagctaaactccttcctggcctgagagtcagctctctgccctgtgtacttcccgggccagggctgcccctaatctctgtaggaaccgtggtatgtctgccatgttgcccctttctcttttcccctttcctgtcccaccatacgagcacctccagcctgaacagaagctcttactctttcctatttcagtgttacctgtgtgcttggtctgtttgactttacgcccatctcaggacacttccgtagactgtttaggttcccctgtcaaatatcagttacccactcggtcccagttttgttgccccagaaagggatgttattatccttgggggctcccagggcaagggttaaggcctgaatcatgagcctgctggaagcccagcccctactgctgtgaaccctggggcctgactgctcagaacttgctgctgtcttgttgcggatggatggaaggttggatggatgggtggatggccgtggatggccgtggatgcgcagtgccttgcatacccaaaccaggtgggagcgttttgttgagcatgacagcctgcagcaggaatatatgtgtgcctatttgtgtggacaaaaatatttacacttagggtttggagctattcaagaggaaatgtcacagaagcagctaaaccaaggactgagcaccctctggattctgaatctcaagatgggggcagggctgtgcttgaaggccctgctgagtcatctgttagggccttggttcaataaagcactgagcaagttgagaaa

SEQ ID NO: 17 - DNA, 2283 bp, Homo sapien
tgcttcctgggcgccgtgggcgcggactgcgcgggctgcgcgggtgccgaggagcgcgaggcgcggggaaggcgcacctggggtggccctggcgtgcgggcggcgacatggaggacggcgtgctcaaggagggcttcctggtcaagaggggccacattgtccacaactggaaggcgcgatggttcatccttcggcagaacacgctggtgtactacaagcttgaggggggtcggagagtgacccctcccaagggccggatcctcctggatggctgcaccatcacctgcccctgcctggagtatgaaaaccgaccgctcctcattaagctgaagactcaaacatccacggagtacttcctggaggcctgttctcgagaggagcgggatgcctgggcctttgagatcaccggggctattcatgcagggcagccggggaaggtccagcagctgcacagcctgagaaactccttcaagctgcccccgcacatcagcctgcatcgcattgtggacaagatgcacgatagcaacaccggaatccgttcaagccccaacatggagcagggaagcacctataaaaagaccttcctcggctcctccctggtggactggctcatctccaacagcttcacggccagccgtctggaggcggtgaccctggcctccatgctcatggaggagaacttcctcaggcctgtgggtgtccgaagcatgggagccattcgctctggggatctggccgagcagttcctggatgactccacagccctgtacacttttgctgagagctacaaaaagaagataagccccaaggaagaaattagcctgagcactgtggagttaagtggcacggtggtgaaacaaggctacctggccaagcagggacacaagaggaaaaactggaaggtgcgtcgctttgttctaaggaaggatccagctttcctgcattactatgacccttccaaagaagagaacaggccagtgggtgggttttctcttcgtggttcactcgtgtctgctctggaagataatggcgttcccactggtaaggtacaacttcagccctggcctgaagatctcaggggcctccctcctgcacctcagtaatgtcccactaatgaaatgacagctttgggagccgagcagggctttctccatgagacagagtggtgtgagttttgaagtgaatttcagaattgaacaaagggtatgttcttggcgttttaagaatacaactaagtaatccttatgttaataatctttcccctcagtttctgtgctgatgccccataagcttccgcctaaaataataggtgaggcttacacaatgctctagggttaacaacataccgtaatatggtatcataatactaatttcacaatagccagccatagtaagaagatattattcccatcttgtgtctgtggaaactgggggttccaataagttaaacaatttgagatcaaactccaaattctatgcttgcttttaacataaacatactggattctttgatgtaaatgaaatggtagatctatggcatgctaccatcttgagcatagggagcaggcaagagggcttccaggaatatccagacataaccattggaaggccttagggcactggtgagggacagggaatgggaggaaaaggggacctcatctgataggattctctaactgtaaaccttttatttaataaatacatcattgtatgtttttgtccatgtctcagttgactttctgctggttcaagatgaaagcagacatggctattcaatcactgatttttttcccccttttttctgcctaggggttaaagggaatgtccagggaaacctcttcaaagtgattactaaggatgacacacactattacattcaggccagcagcaaggctgagcgagccgagtggattgaagctatcaaaaagctaacatgacaaggacctgagggaaccaggattcctccctcctaccagatgacacagacaagagttcctggagaatgggagtgttaagacttttgacttctttgtaagttttgtactgctttggagagtgaatgctgccaagagttcctcagattacaaacagcagtggtgccatttccttccccatcttcatgttacaaacctggaaaggctagaacagccattaggcgtcagcatcttgacttttccccagcatcacaaacagccatttcctcgggcaccaaagtaggttccctttgttggaacaattacactggccatgccataatgttgaataaaactctcttcttatgag

SEQ ID NO: 18 - DNA, 1046 bp, Homo sapien
agagtccgcctatcagccaatgaagagacagcagtgagagcggttgcgcagtgaaggctagacccggtttactggaattgctctggcgatcgaggggtcctagtacaccgcaatcatgtctattatgtcctataacggaggggccgtcatggccatgaaggggaagaactgtgtggccatcgctgcagacaggcgcttcgggatccaggcccagatggtgaccacggacttccagaagatctttcccatgggtgaccggctgtacatcggtctggccgggctcgccactgacgtccagacagttgcccagcgcctcaagttccggctgaacctgtatgagttgaaggaaggtcggcagatcaaaccttataccctcatgagcatggtggccaacctcttgtatgagaaacggtttggcccttactacactgagccagtcattgccgggttggacccgaagacctttaagcccttcatttgctctctagacctcatcggctgccccatggtgactgatgactttgtggtcagtggcacctgcgccgaacaaatgtacggaatgtgtgagtccctctgggagcccaacatggtacgttggtggcatggagaggggctgggctctgagttacccacccttggtcattaggaaaaaagtgtgtttatgtggcaggtaatggggagaatggtgcaggtgggagagaaagccacagctgctgctccttggaagggtatccagaaattccatctgccaggctggctggctggctccagaggagagcatcttctgttaggagaccacagttagatatttgccacagcagtaagaattccttacattgggtttacagggttctcgcatccattcactgagcaaacatttaactcagtgtagggttagaggcagctcaacaggttgtctgggttggcaacctggatccacccaccaccttagttattgttcttggagaagccagtttccctctctgcctccactaccttgactgtaaaatgaggataaaaaagtctgccttagaagtggtgctgag

SEQ ID NO: 19 - DNA, 591 bp, Homo sapien
agagtccgcctatcagccaatgaagagacagcagtgagagcggttgcgcagtgaaggctagacccggtttactggaattgctctggcgatcgaggggtcctagtacaccgcaatcatgtctattatgtcctataacggaggggccgtcatggccatgaaggggaagaactgtgtggccatcgctgcagacaggcgcttcgggatccaggcccagatggtgaccacggacttccagaagatctttcccatgggtgaccggctgtacatcggtctggccgggctcgccactgacgtccagacagttgcccagcgcctcaagttccggctgaacctgtatgagttgaaggaaggtcggcagatcaaaccttataccctcatgagcatggtggccaacctcttgtatgagaaacggtttggcccttactacactgagccagtcattgccgggttggacccgaagacctttaagcccttcatttgctctctagacctcatcggctgccccatggtgactgatgactttgtggtcagtggcacctgcgccgaacaaatgtacctcggccgcgaccacgctaagccgaattccagcac

SEQ ID NO: 20 - DNA, 1471 bp, Homo sapien
caaaacttgaccgtaccctccagttcccccagcctgtgggaagccccagcagctgaaccgggttgtgggcggcgaggacagcactgacagcgagtggccctggatcgtgagcatccagaagaatgggacccaccactgcgcaggttctctgctcaccagccgctgggtgatcactgctgcccactgtttcaaggagtatgtacagccggcctggggcacttgatcttctaaggccctgggctttgtgccccaggccctgggctccctttacaggctctgcttccgggcctctgttcaatcttggtgcccctcgattctacctagaagcctctcctgccttcaggggccttcacacccatgctgttcccccaggtacctcctcccagaccaggcctggctgatcctccccttccctttccttccagcaacctgaacaaaccatacctgttctctgtgctgctgggggcctggcagctggggaaccctggctctcggtcccagaaggtgggtgttgcctgggtggagccccaccctgtgtattcctggaaggaaggtgcctgtgcagacattgccctggtgcgtctcgagcgctccatacagttctcagagcgggtcctgcccatctgcctacctgatgcctctatccacctccctccaaacacccactgctggatctcaggctgggggagcatccaagatggagttcccttgccccaccctcagaccctgcagaagctgaaggttcctatcatcgactcggaagtctgcagccatctgtactggcggggagcaggacagggacccatcactgaggacatgctgtgtgccggctacttggagggggagcgggatgcttgtctgggcgactccgggggccccctcatgtgccaggtggacggcgcctggctgctggccggcatcatcagctggggcgagggctgtgccgagcgcaacaggcccggggtctacatcagcctctctgcgcaccgctcctgggtggagaagatcgtgcaaggggtgcagctccgcgggcgcgctcaggggggtggggccctcagggcaccgagccagggctctggggccgccgcgcgctcctagggcgcagcgggacgcggggctcggatctgaaaggcggccagatccagatctggatctggatctgcggcggcctcgggcggtttcccccgccgtaaataggctcatctactctacctctgggggcccggacggctgctgcggaaaggaaaccccctccccgacccgcccgacggcctcaggccccgcctccaaggcatcaggccccgcccaacggcctcatgtccccgcccccacgacttccggccccgcccccgggccccagcgcttttgtgtatataaatgttaatgatttttataggtatttgtaaccctgcccacatatcttatttattcctccaatttcaataaattatttattctccagaaaaaattt

SEQ ID NO: 21 - DNA, 2312 bp, Homo sapien
gcaagtgtcggtcggggcctcgagctgcctgagctgacacgaggggaggggtctgtgtagccaacaggtgaccgaagggcttgcctgcccacagcttacttggccaaggggtttctgaagttcctgccacaacctgaggttgtggctgggaagagacgcagagggcacagagctgagccgcaggcacaactggacaaagccagagccccaggcccctgtggcctgggaaagagtagctccctccaacctcccccagggccacccgctgcccaagtccttctcctccccaccttctccttcgaacaagagggaggaggaggaggaggagttcaacttcgaggtcatcccaccgccgccagagttcagcaatgaccctgagcccccggccccggccctccagtatctgggccgccagagctcccctccccggaacaactactcagacttgaggcagctcccgaacgctggccccggggcgcccccggctctcggcttctcgcgctttcccgcgggcgcgcgctacgccggggctgggggcctggagcgcttctcgggagggggccgctcgctcataaagaagcgcctgtacgtcggggagccgcaccgaggcccagggctaccccacggtggcaccggccgcagcctgagctctcccaactgcttcgggccgcagcccggaggccccgagatgcggcgcgtgaactcggcgggtcgcgcgccccccggaggcctgcacgcgccgaggctgtccctggagggcgccgcccggggcgccgcggaggccaagcacaaagcgcccggcagcgccgactacggcttcgccccagctgccggcaggtctccctacaccaccacccgctatggaagccccatcaacacgttcaccgtgaggcctgggacccgccatcccatctcctatgtctgctcaggggcccatcggaaagccacctcctgagccaggggttctcttagctctactccaacaaactgtgtctttaaggatctgggcacttgtttcttgtggggggtgggaggtacacagcaggtgttgggcgacctgactcagacacagaggagtctttgatccccaaagaccaacgatgagaagcagtggcccaggaagaccgagagtgggcttctgtttcccaaagcgctggtgtgactgtggactgtttacacgtggggggtgggaggggaaggagggtagagagaaggaaccattaaggacctgggcgctgagtttctgctctctggtactatctgctttagcaagagttatttaaaacagttttacaagcacggcctactgagcaggttctgaaagcaaggggtggggcactgactgaactggaacccatcgagatagctgtgattgcctgtcaggcccttgcaaagggctgaggcccagctctgtctggtgggtgtgcagggcaccgaagggagatctttagcctccatcacctgccatcccaagcaagagtggacacctggggttcctagccgcattgaggtgggaccaggaatgtgtatgtataacatgtggagaaggaccatgtgtggggtggggagtgaagctcccacatgtggaatggaagccctttgcattggccaagggcagaggtgggagattgatggttcatttttccttggccctagcccttagctacagggaggcctagagagaggacacttggcaagtttaggatgggaaacaaggttaagcctggctttgctattcagacctgtgcagccctgattttggggactgggcccaaggagccatgagtcttaggcttgacactaggggccttacatggccaggtctcatatgggatttggagaaggcatttttcctaacactgatactacaagtcaccaatactcttgatgccttaagatgctagaaagccttggagagtggaggcagcagagatgggaatggaggtctgaagaagcttgctgctgttggggaatgtgtttgggaaagtcaagagtggtaggattggttggctgggcgcggtggctcacacctgtaatcccagcactttgggaggccgaggccggtggatcacttgaggtcagaagttcgagaccagcctgcccaaatggtgaaaccccatctctactaaaaatacggaaaaaaaaaaaaaaagagtgctaggattgggccagttaagagcaggggagacctggctgggcatggtggctcacacctgtaattctagcactttgggaggctgaggcgggtggatcatgaggtcaagagattaagaccatcctggcctacatggcgaaaccctgtctctactaaa

SEQ ID NO: 22 - DNA, 8227 bp, Homo sapien
cgcccccgcctctgagctcccttcccatggcggccctagtgttggaggacgggtcggtcctgcggggccagccctttggggccgccgtgtcgactgccggggaagtggtgtttcaaaccggcatggtcggctaccccgaggccctcactgatccctcctacaaggcacagatcttagtgctcacctatcctctgatcggcaactatggcatccccccagatgaaatggatgagttcggtctctgcaagtggtttgaatcctcgggcatccacgtagcagcactggtagtgggagagtgctgtcctactcccagccactggagtgccacccgcaccctgcatgagtggctgcagcagcatggcatccctggcttgcaaggagtagacactcgggagctgaccaagaagttgcgggaacaggggtctctgctggggaagctggtccagaatggaacagaaccttcatccctgccattcttggaccccaatgcccgccccctggtaccagaggtctccattaagactccacgggtattcaatacagggggtgcccctcggatccttgctttggactgtggcctcaagtataatcagatccgatgcctctgccagcgtggggctgaggtcactgtggtaccctgggaccatgcactagacagccaagagtatgagggtctcttcttaagtaatgggcctggtgaccctgcctcctatcccagtgtcgtatccacactgagccgtgttttatctgagcctaatccccgacctgtctttgggatctgcctgggacaccagctattggccttagccattggggccaagacttacaagatgagatatgggaaccgaggccataaccagccctgcttgttggtgggctctgggcgctgctttctgacatcccagaaccatgggtttgctgtggagacagactcactgccagcagactgggctcctctcttcaccaacgccaatgatggttccaatgaaggcattgtgcacaacagcttgcctttcttcagtgtccagtttcacccagagcaccaagctggcccttcagatatggaactgcttttcgatatctttctggaaactgtgaaagaggccacagctgggaaccctgggggccagacagttagagagcggctgactgagcgcctctgtccccctgggattcccactcccggctctggacttccaccaccacgaaaggttctgatcctgggctcagggggcctctccattggccaagctggagaatttgactactcgggctctcaggcaattaaggccctgaaggaggaaaacatccagacgttgctgatcaaccccaatattgccacagtgcagacctcccaggggctggccgacaaggtctattttcttcccataacacctcattatgtaacccaggtgatacgtaatgaacgccccgatggtgtgttactgacttttgggggccagactgctctgaactgtggtgtggagctgaccaaggccggggtgctggctcggtatggggtccgggtcctgggcacaacagtggagaccattgagctgaccgaggatcgacgggcctttgctgccagaatggcagagatcggagagcatgtggccccgagcgaggcaggaaattctcttgaacaggcccaggcagccgctgaacggctggggtaccctgtgctagtgcgtgcagcctttgccgtgggtggcctgggctctggctttgcctctaacagggaggagctctctgctctcgtggccccagcttttgcccataccagccaagtgctagtagacaagtctctgaagggatggaaggagattgagtacgaggtggtgagagacgcctatggcaactgtgtcacggtgtgtaacatggagaacttggacccactgggcatccacactggtgagtccatagtggtggcccctagccagacactgaatgacagggagtatcagctcctgaggcagacagctatcaaggtgacccagcacctgggaattgttggggagtgcaatgtgcagtatgccttgaaccctgagtctgagcagtattacatcattgaagtgaatgccaggctctctcgcagctctgccctggccagtaaggccacaggttatccactggcttatgtggcagccaagctagcattgggcatccctttgcctgagctcaggaactctgtgacagggggtacagcagcctttgaacccagcgtggattattgtgtggtgaagattcctcgatgggaccttagcaagttcctgcgagtcagcacaaagattgggagctgcatgaagagcgttggtgaagtcatgggcattgggcgttcatttgaggaggccttccagaaggccctgcgcatggtggatgagaactgtgtgggctttgatcacacagtgaaaccagtcagcgatatggagttggagactccaacagataagcggatttttgtggtggcagctgctttgtgggctggttattcagtggaccgcctgtatgagctcacacgcatcgaccgctggttcctgcaccgaatgaagcgtatcatcgcacatgcccagctgctagaacaacaccgtggacagcctttgccgccagacctgctgcaacaggccaagtgtcttggcttctcagacaaacagattgcccttgcagttctgagcacagagctggctgttcgcaagctgcgtcaggaactggggatctgtccagcagtgaaacagattgacacagttgcagctgagtggccagcccagacaaattacctatacctaacgtattggggcaccacccatgacctcacctttcgaacacctcatgtcctagtccttggctctggcgtctaccgtattggctctagcgttgaatttgactggtgtgctgtaggctgcatccagcagctccgaaagatgggatataagaccatcatggtgaactataacccagagacagtcagcaccgactatgacatgtgtgatcgactctactttgatgagatctcttttgaggtggtgatggacatctatgagctcgagaaccctgaaggtgtgatcctatccatgggtggacagctgcccaacaacatggccatggcgttgcatcggcagcagtgccgggtgctgggcacctcccctgaagccattgactcggctgagaaccgtttcaagttttcccggctccttgacaccattggtatcagccagcctcagtggagggagctcagtgacctcgagtctgctcgccaattctgccagaccgtggggtacccctgtgtggtgcgcccctcctatgtgctgagcggtgctgctatgaatgtggcctacacggatggagacctggagcgcttcctgagcagcgcagcagccgtctccaaagagcatcccgtggtcatctccaagttcatccaggaggctaaggagattgacgtggatgccgtggcctctgatggtgtggtggcagccatcgccatctctgagcatgtggagaatgcaggtgtgcattcaggtgatgcgacgctggtgacccccccacaagatatcactgccaaaaccctggagcggatcaaagccattgtgcatgctgtgggccaggagctacaggtcacaggacccttcaatctgcagctcattgccaaggatgaccagctgaaagttattgaatgcaacgtacgtgtctctcgctccttccccttcgtttccaagacactgggtgtggacctagtagccttggccacgcgggtcatcatgggggaagaagtggaacctgtggggctaatgactggttctggagtcgtgggagtaaaggtgcctcagttctccttctcccgcttggcgggtgctgacgtggtgttgggtgtggaaatgaccagtactggggaggtggccggctttggggagagccgctgtgaggcatacctcaaggccatgctaagcactggctttaagatccccaagaagaatatcctgctgaccattggcagctataagaacaaaagcgagctgctcccaactgtgcggctactggagagcctgggctacagcctctatgccagtctcggcacagctgacttctacactgagcatggcgtcaaggtaacagctgtggactggcactttgaggaggctgtggatggtgagtgcccaccacagcggagcatcctggagcagctagctgagaaaaactttgagctggtgattaacctgtcaatgcgtggagctgggggccggcgtctctcttcctttgtcaccaagggctaccgcacccgacgcttggccgctgacttctccgtgcccctaatcatcgatatcaagtgcaccaaactctttgtggaggccctaggccagatcgggccagcccctcctttgaaggtgcatgttgactgtatgacctcccaaaagcttgtgcgactgccgggattgattgatgtccatgtgcacctgcgggaaccaggtgggacacataaggaggactttgcttcaggcacagccgctgccctggctgggggtatcaccatggtgtgtgccatgcctaatacccggccccccatcattgacgcccctgctctggccctggcccagaagctggcagaggctggcgcccggtgcgactttgcgctattccttggggcctcgtctgaaaatgcaggaaccttgggcaccgtggccgggtctgcagccgggctgaagctttacctcaatgagaccttctctgagctgcggctggacagcgtggtccagtggatggagcatttcgagacatggccctcccacctccccattgtggctcacgcagagcagcaaaccgtggctgctgtcctcatggtggctcagctcactcagcgctcagtgcacatatgtcacgtggcacggaaggaggaggtaagagtacacctgagatcctgctgtccctgttgctttcccagtaacaccaaaggtcagggtagtccttaggggcaggagacagcaggaggagagtctggagacagcaggaggagggtctcgagccagcacccttgcaggtctacatcatcatttttttgagcagggatgttggccattgggactttgtgtagggcaaggcatatgggtggtgcctcttctggatcttcccattgttccccagatcctgctaattaaagctgcaaaggcacggggcttgccagtgacctgcgaggtggctccccaccacctgttcctaagccatgatgacctggagcgcctggggcctgggaagggggaggtccggcctgagcttggctcccgccaggatgtggaagccctgtgggagaacatggctgtcatcgactgctttgcctcagaccatgctccccataccttggaggagaagtgtgggtccaggcccccacctgggttcccagggttagagaccatgctgccactactcctgacggctgtaagcgagggccggctcagcctggacgacctgctgcagcgattgcaccacaatcctcggcgcatctttcacctgcccccgcaggaggacacctatgtggaggtggatctggagcatgagtggacaattcccagccacatgcccttctccaaggcccactggacaccttttgaagggcagaaagtgaagggcaccgtccgccgtgtggtcctgcgaggggaggttgcctatatcgatgggcaggttctggtacccccgggctatggacaggatgtacggaagtggccacagggggctgttcctcagctcccaccctcagcccctgccactagtgagatgaccacgacacctgaaagaccccgccgtggcatcccagggcttcctgatggccgcttccatctgccgccccgaatccatcgagcctccgacccaggtttgccagctgaggagccaaaggagaagtcctctcggaaggtagccgagccagagctgatgggaacccctgatggcacctgctaccctccaccaccagtaccgagacaggcatctccccagaacctggggacccctggcttgctgcacccccagacctcacccctgctgcactcattagtgggccaacatatcctgtccgtccagcagttcaccaaggatcagatgtctcacctgttcaatgtggcacacacactgcgtatgatggtgcagaaggagcggagcctcgacatcctgaaggggaaggtcatggcctccatgttctatgaagtgagcacacggaccagcagctcctttgcagcagccatggcccggctgggaggtgctgtgctcagcttctcggaagccacatcgtccgtccagaagggcgaatccctggctgactccgtgcagaccatgagctgctatgccgacgtcgtcgtgctccggcacccccagcctggagcagtggagctggccgccaagcactgccggaggccagtgatcaatgctggggatggggtcggagagcaccccacccaggccctgctggacatcttcaccatccgtgaggagctgggaactgtcaatggcatgacgatcacgatggtgggtgacctgaagcacggacgcacagtacattccctggcctgcctgctcacccagtatcgtgtcagcctgcgctacgtggcacctcccagcctgcgcatgccacccactgtgcgggccttcgtggcctcccgcggcaccaagcaggaggaattcgagagcattgaggaggcgctgcctgacactgatgtgctctacatgactcgaatccagaaggaacgatttggctctacccaggagtacgaagcttgctttggtcagttcatcctcactccccacatcatgacccgggccaagaagaagatggtggtgatgcacccgatgccccgtgtcaacgagataagcgtggaagtggactcggatccccgcgcagcctacttccgccaggctgagaacggcatgtacatccgcatggctctgttagccaccgtgctgggccgtttctagggcctggcttcctcagcctcttctctttaggcccagctgctgggcaaggaattccagtgcctcctacgggggcagcacacttagatattcctggacatccagatagctcacatgtgctgaccacacttcaggctctggactggagctctctggcatgggggtggggcctcagatgctggggcccagtctgccccatcttcattcctgcaccttaaacctgtacagtcatttttctactgacttaataaacagccgagctgtcccttgatgctgagtgtagtagaacagagctttcttttagaaaattgagcagattcccaaattataagagcagcctcaccaggcagggctctggctagggctgcgtgcccacactcggcattttcacactcgtgactctttgggactcggcaggagcgtgttaactctgtgctctctgagtcctgtgtcgtgctgatgccagcgcttacctgggggctctggctggtgtccagccctccttcctcaattcagttgactcaaagacctgacagagagttctgccctcttcctgacactgggagaacactcatcagggtaaaaggaaggctgagcactgcggcctgtctgaggccaggcctggactcttcctcactctttctggttagtcctcctccagtggctaaggctgccattgcattctcaaaaccaccctggagttcttcagccactgtcactattaggagcccctcctatttcccatccctgggagcctctgcctgacattggacagaggggcagatgccatggaggctgaggagcactttggcttggagaccccagggcagcagcctaagggcagtagcttatgtgtctgtgggtgagggcttctgaggagcagctgtgccctccagtgaacttgagtagcattggagaaatctcatttcttgttccaacaaaacttagcactctgtgggtacaaagcaccatgtgcagtgggagtacaaggaagaacaaggcaattctcaccctcagttttcagcctcgggtcataaggcttccagtggcttctacagattaaactgctgcacactggcacatgatagtgcaaactgctctgacaccattcaggaatcacctacttcatccagagagtaacagcgtattctagagatgagaaaaggagaaggacctcgttttttgagaacttagtgtgaacaggaacttgatgcgtattctcatttctcacaccagccttccacccatttcacagatgtggacactggctcagagaagtggt

SEQ ID NO: 23 - DNA, 8034 bp, Homo sapien
cgcccccgcctctgagctcccttcccatggcggccctagtgttggaggacgggtcggtcctgcggggccagccctttggggccgccgtgtcgactgccggggaagtggtgtttcaaaccggcatggtcggctaccccgaggccctcactgatccctcctacaaggcacagatcttagtgctcacctatcctctgatcggcaactatggcatccccccagatgaaatggatgagttcggtctctgcaagtggtttgaatcctcgggcatccacgtagcagcactggtagtgggagagtgctgtcctactcccagccactggagtgccacccgcaccctgcatgagtggctgcagcagcatggcatccctggcttgcaaggagtagacactcgggagctgaccaagaagttgcgggaacaggggtctctgctggggaagctggtccagaatggaacagaaccttcatccctgccattcttggaccccaatgcccgccccctggtaccagaggtctccattaagactccacgggtattcaatacagggggtgcccctcggatccttgctttggactgtggcctcaagtataatcagatccgatgcctctgccagcgtggggctgaggtcactgtggtaccctgggaccatgcactagacagccaagagtatgagggtctcttcttaagtaatgggcctggtgaccctgcctcctatcccagtgtcgtatccacactgagccgtgttttatctgagcctaatccccgacctgtctttgggatctgcctgggacaccagctattggccttagccattggggccaagacttacaagatgagatatgggaaccgaggccataaccagccctgcttgttggtgggctctgggcgctgctttctgacatcccagaaccatgggtttgctgtggagacagactcactgccagcagactgggctcctctcttcaccaacgccaatgatggttccaatgaaggcattgtgcacaacagcttgcctttcttcagtgtccagtttcacccagagcaccaagctggcccttcagatatggaactgcttttcgatatctttctggaaactgtgaaagaggccacagctgggaaccctgggggccagacagttagagagcggctgactgagcgcctctgtccccctgggattcccactcccggctctggacttccaccaccacgaaaggttctgatcctgggctcagggggcctctccattggccaagctggagaatttgactactcgggctctcaggcaattaaggccctgaaggaggaaaacatccagacgttgctgatcaaccccaatattgccacagtgcagacctcccaggggctggccgacaaggtctattttcttcccataacacctcattatgtaacccaggtgatacgtaatgaacgccccgatggtgtgttactgacttttgggggccagactgctctgaactgtggtgtggagctgaccaaggccggggtgctggctcggtatggggtccgggtcctgggcacaacagtggagaccattgagctgaccgaggatcgacgggcctttgctgccagaatggcagagatcggagagcatgtggccccgagcgaggcaggaaattctcttgaacaggcccaggcagccgctgaacggctggggtaccctgtgctagtgcgtgcagcctttgccgtgggtggcctgggctctggctttgcctctaacagggaggagctctctgctctcgtggccccagcttttgcccataccagccaagtgctagtagacaagtctctgaagggatggaaggagattgagtacgaggtggtgagagacgcctatggcaactgtgtcacggtgtgtaacatggagaacttggacccactgggcatccacactggtgagtccatagtggtggcccctagccagacactgaatgacagggagtatcagctcctgaggcagacagctatcaaggtgacccagcacctgggaattgttggggagtgcaatgtgcagtatgccttgaaccctgagtctgagcagtattacatcattgaagtgaatgccaggctctctcgcagctctgccctggccagtaaggccacaggttatccactggcttatgtggcagccaagctagcattgggcatccctttgcctgagctcaggaactctgtgacagggggtacagcagcctttgaacccagcgtggattattgtgtggtgaagattcctcgatgggaccttagcaagttcctgcgagtcagcacaaagattgggagctgcatgaagagcgttggtgaagtcatgggcattgggcgttcatttgaggaggccttccagaaggccctgcgcatggtggatgagaactgtgtgggctttgatcacacagtgaaaccagtcagcgatatggagttggagactccaacagataagcggatttttgtggtggcagctgctttgtgggctggttattcagtggaccgcctgtatgagctcacacgcatcgaccgctggttcctgcaccgaatgaagcgtatcatcgcacatgcccagctgctagaacaacaccgtggacagcctttgccgccagacctgctgcaacaggccaagtgtcttggcttctcagacaaacagattgcccttgcagttctgagcacagagctggctgttcgcaagctgcgtcaggaactggggatctgtccagcagtgaaacagattgacacagttgcagctgagtggccagcccagacaaattacctatacctaacgtattggggcaccacccatgacctcacctttcgaacacctcatgtcctagtccttggctctggcgtctaccgtattggctctagcgttgaatttgactggtgtgctgtaggctgcatccagcagctccgaaagatgggatataagaccatcatggtgaactataacccagagacagtcagcaccgactatgacatgtgtgatcgactctactttgatgagatctcttttgaggtggtgatggacatctatgagctcgagaaccctgaaggtgtgatcctatccatgggtggacagctgcccaacaacatggccatggcgttgcatcggcagcagtgccgggtgctgggcacctcccctgaagccattgactcggctgagaaccgtttcaagttttcccggctccttgacaccattggtatcagccagcctcagtggagggagctcagtgacctcgagtctgctcgccaattctgccagaccgtggggtacccctgtgtggtgcgcccctcctatgtgctgagcggtgctgctatgaatgtggcctacacggatggagacctggagcgcttcctgagcagcgcagcagccgtctccaaagagcatcccgtggtcatctccaagttcatccaggaggctaaggagattgacgtggatgccgtggcctctgatggtgtggtggcagccatcgccatctctgagcatgtggagaatgcaggtgtgcattcaggtgatgcgacgctggtgacccccccacaagatatcactgccaaaaccctggagcggatcaaagccattgtgcatgctgtgggccaggagctacaggtcacaggacccttcaatctgcagctcattgccaaggatgaccagctgaaagttattgaatgcaacgtacgtgtctctcgctccttccccttcgtttccaagacactgggtgtggacctagtagccttggccacgcgggtcatcatgggggaagaagtggaacctgtggggctaatgactggttctggagtcgtgggagtaaaggtgcctcagttctccttctcccgcttggcgggtgctgacgtggtgttgggtgtggaaatgaccagtactggggaggtggccggctttggggagagccgctgtgaggcatacctcaaggccatgctaagcactggctttaagatccccaagaagaatatcctgctgaccattggcagctataagaacaaaagcgagctgctcccaactgtgcggctactggagagcctgggctacagcctctatgccagtctcggcacagctgacttctacactgagcatggcgtcaaggtaacagctgtggactggcactttgaggaggctgtggatggtgagtgcccaccacagcggagcatcctggagcagctagctgagaaaaactttgagctggtgattaacctgtcaatgcgtggagctgggggccggcgtctctcttcctttgtcaccaagggctaccgcacccgacgcttggccgctgacttctccgtgcccctaatcatcgatatcaagtgcaccaaactctttgtggaggccctaggccagatcgggccagcccctcctttgaaggtgcatgttgactgtatgacctcccaaaagcttgtgcgactgccgggattgattgatgtccatgtgcacctgcgggaaccaggtgggacacataaggaggactttgcttcaggcacagccgctgccctggctgggggtatcaccatggtgtgtgccatgcctaatacccggccccccatcattgacgcccctgctctggccctggcccagaagctggcagaggctggcgcccggtgcgactttgcgctattccttggggcctcgtctgaaaatgcaggaaccttgggcaccgtggccgggtctgcagccgggctgaagctttacctcaatgagaccttctctgagctgcggctggacagcgtggtccagtggatggagcatttcgagacatggccctcccacctccccattgtggctcacgcagagcagcaaaccgtggctgctgtcctcatggtggctcagctcactcagcgctcagtgcacatatgtcacgtggcacggaaggaggagatcctgctaattaaagctgcaaaggcacggggcttgccagtgacctgcgaggtggctccccaccacctgttcctaagccatgatgacctggagcgcctggggcctgggaagggggaggtccggcctgagcttggctcccgccaggatgtggaagccctgtgggagaacatggctgtcatcgactgctttgcctcagaccatgctccccataccttggaggagaagtgtgggtccaggcccccacctgggttcccagggttagagaccatgctgccactactcctgacggctgtaagcgagggccggctcagcctggacgacctgctgcagcgattgcaccacaatcctcggcgcatctttcacctgcccccgcaggaggacacctatgtggaggtggatctggagcatgagtggacaattcccagccacatgcccttctccaaggcccactggacaccttttgaagggcagaaagtgaagggcaccgtccgccgtgtggtcctgcgaggggaggttgcctatatcgatgggcaggttctggtacccccgggctatggacaggatgtacggaagtggccacagggggctgttcctcagctcccaccctcagcccctgccactagtgagatgaccacgacacctgaaagaccccgccgtggcatcccagggcttcctgatggccgcttccatctgccgccccgaatccatcgagcctccgacccaggtttgccagctgtgttcctccgcccaggagctgggatcccacggggcagcagagcgtgggctgaggagccaaaggagaagtcctctcggaaggtagccgagccagagctgatgggaacccctgatggcacctgctaccctccaccaccagtaccgagacaggcatctccccagaacctggggacccctggcttgctgcacccccagacctcacccctgctgcactcattagtgggccaacatatcctgtccgtccagcagttcaccaaggatcagatgtctcacctgttcaatgtggcacacacactgcgtatgatggtgcagaaggagcggagcctcgacatcctgaaggggaaggtcatggcctccatgttctatgaagtgagcacacggaccagcagctcctttgcagcagccatggcccggctgggaggtgctgtgctcagcttctcggaagccacatcgtccgtccagaagggcgaatccctggctgactccgtgcagaccatgagctgctatgccgacgtcgtcgtgctccggcacccccagcctggagcagtggagctggccgccaagcactgccggaggccagtgatcaatgctggggatggggtcggagagcaccccacccaggccctgctggacatcttcaccatccgtgaggagctgggaactgtcaatggcatgacgatcacgatggtgggtgacctgaagcacggacgcacagtacattccctggcctgcctgctcacccagtatcgtgtcagcctgcgctacgtggcacctcccagcctgcgcatgccacccactgtgcgggccttcgtggcctcccgcggcaccaagcaggaggaattcgagagcattgaggaggcgctgcctgacactgatgtgctctacatgactcgaatccagaaggaacgatttggctctacccaggagtacgaagcttgctttggtcagttcatcctcactccccacatcatgacccgggccaagaagaagatggtggtgatgcacccgatgccccgtgtcaacgagataagcgtggaagtggactcggatccccgcgcagcctacttccgccaggctgagaacggcatgtacatccgcatggctctgttagccaccgtgctgggccgtttctagggcctggcttcctcagcctcttctctttaggcccagctgctgggcaaggaattccagtgcctcctacgggggcagcacacttagatattcctggacatccagatagctcacatgtgctgaccacacttcaggctctggactggagctctctggcatgggggtggggcctcagatgctggggcccagtctgccccatcttcattcctgcaccttaaacctgtacagtcatttttctactgacttaataaacagccgagctgtcccttgatgctgagtgtagtagaacagagctttcttttagaaaattgagcagattcccaaattataagagcagcctcaccaggcagggctctggctagggctgcgtgcccacactcggcattttcacactcgtgactctttgggactcggcaggagcgtgttaactctgtgctctctgagtcctgtgtcgtgctgatgccagcgcttacctgggggctctggctggtgtccagccctccttcctcaattcagttgactcaaagacctgacagagagttctgccctcttcctgacactgggagaacactcatcagggtaaaaggaaggctgagcactgcggcctgtctgaggccaggcctggactcttcctcactctttctggttagtcctcctccagtggctaaggctgccattgcattctcaaaaccaccctggagttcttcagccactgtcactattaggagcccctcctatttcccatccctgggagcctctgcctgacattggacagaggggcagatgccatggaggctgaggagcactttggcttggagaccccagggcagcagcctaagggcagtagcttatgtgtctgtgggtgagggcttctgaggagcagctgtgccctccagtgaacttgagtagcattggagaaatctcatttcttgttccaacaaaacttagcactctgtgggtacaaagcaccatgtgcagtgggagtacaaggaagaacaaggcaattctcaccctcagttttcagcctcgggtcataaggcttccagtggcttctacagattaaactgctgcacactggcacatgatagtgcaaactgctctgacaccattcaggaatcacctacttcatccagagagtaacagcgtattctagagatgagaaaaggagaaggacctcgttttttgagaacttagtgtgaacaggaacttgatgcgtattctcatttctcacaccagccttccacccatttcacagatgtggacactggctcagagaagtggt

SEQ ID NO: 24 - DNA, 3036 bp, Homo sapien
aactctggccaacgttatccctccagacacctgaaagaccccgccgtggcatcccagggcttcctgatggccgcttccatctgccgccccgaatccatcgagcctccgacccaggtttgccaggtaagagtggggttcctgtgactcagagactgtgtagggacaggatccacttcttcccagtgcctcgcctttctctacttacatgtcctcctctccatccctttatcctcgtctgatctgccgtgccatcctttgcctaaacaagtctccccggtgtgagtagacatctcacagcttctcacatgcccttttttgttgtgggcagctgtgttcctccgcccaggagctgggatcccacggggcagcagagcgtggggtaaatccaggttgttggttggtgtgagtctggccgttcctcttgcctaggatgcctttgccaactgggagagccccgggagggcaccactgctcccatacaacacagccccatgggaagccacctgtctgtccccagagctgctgcagtcccctgccctcccctaacctgctatattactgtgttgtgaattggtttaacatatacactgtgattcagagttcctgggaatatggggtttctttccaaacctcagccataaatgtatatctgtcctcttgtcctgtttgcagctgaggagccaaaggagaagtcctctcggaaggtagccgagccagagctgatgggaacccctgatggcacctgctaccctccaccaccagtaccgagacaggcatctccccagaacctggggacccctggcttgctgcacccccagacctcacccctgctgcactcattagtgggccaacatatcctgtccgtccagcagttcaccaaggatcagatgtctcacctgttcaatgtggcacacacactgcgtatgatggtgcagaaggagcggagcctcgacatcctgaaggggaaggtcatggcctccatgttctatgaagtgagcacacggaccagcagctcctttgcagcagccatggcccggctgggaggtgctgtgctcagcttctcggaagccacatcgtccgtccagaagggcgaatccctggctgactccgtgcagaccatgagctgctatgccgacgtcgtcgtgctccggcacccccagcctggagcagtggagctggccgccaagcactgccggaggccagtgatcaatgctggggatggggtcggagagcaccccacccaggccctgctggacatcttcaccatccgtgaggagctgggaactgtcaatggcatgacgatcacgatggtgggtgacctgaagcacggacgcacagtacattccctggcctgcctgctcacccagtatcgtgtcagcctgcgctacgtggcacctcccagcctgcgcatgccacccactgtgcgggccttcgtggcctcccgcggcaccaagcaggaggaattcgagagcattgaggaggcgctgcctgacactgatgtgctctacatgactcgaatccagaaggaacgatttggctctacccaggagtacgaagcttgctttggtcagttcatcctcactccccacatcatgacccgggccaagaagaagatggtggtgatgcacccgatgccccgtgtcaacgagataagcgtggaagtggactcggatccccgcgcagcctacttccgccaggctgagaacggcatgtacatccgcatggctctgttagccaccgtgctgggccgtttctagggcctggcttcctcagcctcttctctttaggcccagctgctgggcaaggaattccagtgcctcctacgggggcagcacacttagatattcctggacatccagatagctcacatgtgctgaccacacttcaggctctggactggagctctctggcatgggggtggggcctcagatgctggggcccagtctgccccatcttcattcctgcaccttaaacctgtacagtcatttttctactgacttaataaacagccgagctgtcccttgatgctgagtgtagtagaacagagctttcttttagaaaattgagcagattcccaaattataagagcagcctcaccaggcagggctctggctagggctgcgtgcccacactcggcattttcacactcgtgactctttgggactcggcaggagcgtgttaactctgtgctctctgagtcctgtgtcgtgctgatgccagcgcttacctgggggctctggctggtgtccagccctccttcctcaattcagttgactcaaagacctgacagagagttctgccctcttcctgacactgggagaacactcatcagggtaaaaggaaggctgagcactgcggcctgtctgaggccaggcctggactcttcctcactctttctggttagtcctcctccagtggctaaggctgccattgcattctcaaaaccaccctggagttcttcagccactgtcactattaggagcccctcctatttcccatccctgggagcctctgcctgacattggacagaggggcagatgccatggaggctgaggagcactttggcttggagaccccagggcagcagcctaagggcagtagcttatgtgtctgtgggtgagggcttctgaggagcagctgtgccctccagtgaacttgagtagcattggagaaatctcatttcttgttccaacaaaacttagcactctgtgggtacaaagcaccatgtgcagtgggagtacaaggaagaacaaggcaattctcaccctcagttttcagcctcgggtcataaggcttccagtggcttctacagattaaactgctgcacactggcacatgatagtgcaaactgctctgacaccattcaggaatcacctacttcatccagagagtaacagcgtattctagagatgagaaaaggagaaggacctcgttttttgagaacttagtgtgaacaggaacttgatgcgtattctcatttctcacaccagccttccacccatttcacagatgtggacactggctcagagaagtggt

SEQ ID NO: 25 - DNA, 3637 bp, Homo sapien
agctgttccccgcgctgcgcggagcagggaccaggcggttgcggcggcgacagccatggccggcgcgctggcaggtctggccgcgggcttgcaggtcccgcgggtcgcgcccagcccagactcggactcggacacagactcggaggacccgagtctccggcgcagcgcgggcggcttgctccgctcgcaggtcatccacagcggtcacttcatggtgtcgtcgccgcacagcgactcgctgccccggcggcgcgaccaggaggggtccgtggggccctccgacttcgggccgcgcagtatcgaccccacactcacacgcctcttcgagtgcttgagcctggcctacagtggcaagctggtgtctcccaagtggaagaatttcaaaggcctcaagctgctctgcagagacaagatccgcctgaacaacgccatctggagggcctggtatatccagtatgtgaagcggaggaagagccccgtgtgtggcttcgtgacccccctgcaggggcctgaggctgatgcgcaccggaagccggaggccgtggtcctggaggggaactactggaagcggcgcatcgaggtggtgatgcgggaataccacaagtggcgcatctactacaagaagcgggtcagtgggggagggccagggaggccccagagctttcctcctgcggctgccggctaccgcccgcctcggaagatccctggaaaggggatcctgacccccgagcttgcgcccctcgggccctccattcagtcccgggccgacagcgccaccgtgtggccacagcgtctcctagcggcctccttacctaggggtcggctccgtaagcccagcagggaagatgacctcctggcccctaagcaggcggaaggcaggtggccgccgccggagcaatggtgcaaacagctcttctccagtgtggtccccgtgctgctgggggacccagaggaggagccgggtgggcggcagctcctggacctcaattgctttttgtccgacatctcggacactctcttcaccatgactcagtccggcccttcgcccctgcagctgccgcctgaggatgcctacgtcggcaatgctgacatgatccagccggacctgacgccactgcagccaagcctggatgacttcatggacatctcagatttctttaccaactcccgcctcccacagccgcccatgccttcaaacttcccagagccccccagcttcagccccgtggttgactccctcttcagcagtgggaccctgggcccagaggtgcccccggcttcctcggccatgacccacctctctggacacagccgtctgcaggctcggaacagctgccctggccccttggactccagcgccttcctgagttctgatttcctccttcctgaagaccccaagccccggctcccaccccctcctgtacccccacctctgctgcattaccctccccctgccaaggtgccaggcctggagccctgccccccacctcccttccctcccatggcaccacccactgctttgctgcaggaagagcctctcttctctcccaggtttcccttccccaccgtccctcctgccccaggagtgtctccgctgcctgctcctgcagccttcccacccaccccacagtctgtccccagcccagcccccacccccttccccatagagcttctacccttggggtattcggagcctgcctttgggccttgcttctccatgcccagaggcaagccccccgccccatcccctaggggacagaaagccagcccccctaccttagcccctgccactgccagtccccccaccactgcggggagcaacaacccctgcctcacacagctgctcacagcagctaagccggagcaagccctggagccaccacttgtatccagcaccctcctccggtccccagggtccccgcaggagacagtccctgaattcccctgcacattccttcccccgaccccggcccctacaccgccccggccacctccaggcccggccacattggccccttccaggcccctgcttgtccccaaagcggagcggctctcacccccagcgcccagcggtaaagagaggggttgcagggattgggggaatctaggggatgaggggaagaggaggaagaagaaggggactgggtctggggccagatgagaggaagggggcaatggggaccctttcccctgggtcggtctttctgtgggtctgtctgtccctaccacaggcagtgaacggcggctgtcaggggacctcagctccatgccaggccctgggactctgagcgtccgtgtctctcccccgcaacccatcctcagccggggccgtccagacagcaacaagaccgagaaccggcgtatcacacacatctccgcggagcagaagcggcgcttcaacatcaagctggggtttgacacccttcatgggctcgtgagcacactcagtgcccagcccagcctcaaggtgagcaaagctaccacgctgcagaagacagctgagtacatccttatgctacagcaggagcgtgcgggcttgcaggaggaggcccagcagctgcgggatgagattgaggagctcaatgccgccattaacctgtgccagcagcagctgcccgccacaggggtacccatcacacaccagcgttttgaccagatgcgagacatgtttgatgactacgtccgaacccgtacgctgcacaactggaagttctgggtgttcagcatcctcatccggcctctgtttgagtccttcaacgggatggtgtccacggcaagtgtgcacaccctccgccagacctcactggcctggctggaccagtactgctctctgcccgctctccggccaactgtcctgaactccctacgccagctgggcacatctaccagtatcctgaccgacccgggccgcatccctgagcaagccacacgggcagtcacagagggcacccttggcaaacctttatagtcctggccagaccctgctgctcactcagctgccctgggggctgctttccctgggcacgggctccagggatcatctctgggcactcccttcctgccccaggccctggctctgcccttccctggggggtggagcagggtccaggtttcacacttgccacctcctggaggtcaagaagagcagagtccccgtccctgctctgccactgtgctccagcaccgtgaccttgggtgactcgtccgctgtctttggaccgctgtgtttcaatctgcaaaatggggatggggaaggttcaatcagcagatgacccccaggccttggcagctgtgacattgggggcctaggctggcaactccgggggctcaacggtggaaagaggaggatgctgtttctctgtcacctccacttgctccccgacaggtggggcacagacctctgttcctgagcagagaagcagaaaaggaggttccctctctctgctccttcactgctgacccagaggggctgcaggatggtttcccctgggagaggccaggagggcctgatcccaggagacaccagggccagagtgaccacagcagggcaggcatcatgtgtgtgtgtgtgtgtggatgtgtgtgtgtgggttttgtaaagaattcttgaccaataaaagcaaaaactgtctgctgg

SEQ ID NO: 26 - DNA, 2763 bp, Homo sapien
ctcatcgaagcccctggggacagaaagagggtccctgggataaagcttagtcttagtgacctcctaattccttccccacggggtcctgggcctgtcaatcaagaggtggaggcctatggggcgggaactagggaatgaggaaccacccccacccctgttccagtcccgggagggggtgggggctgcccaggggcagaagtgtgcatggcagtgccctgggagcaggccagcctgggagggcagcggccctgtctgggcacacagcgcccggccacagatttctttaccaactcccgcctcccacagccgcccatgccttcaaacttcccagagccccccagcttcagccccgtggttgactccctcttcagcagtgggaccctgggcccagaggtgcccccggcttcctcggccatgacccacctctctggacacagccgtctgcaggctcggaacagctgccctggccccttggactccagcgccttcctgagttctgatttcctccttcctgaagaccccaagccccggctcccaccccctcctgtacccccacctctgctgcattaccctccccctgccaaggtgccaggcctggagccctgccccccacctcccttccctcccatggcaccacccactgctttgctgcaggaagagcctctcttctctcccaggtttcccttccccaccgtccctcctgccccaggagtgtctccgctgcctgctcctgcagccttcccacccaccccacagtctgtccccagcccagcccccacccccttccccatagagcttctacccttggggtattcggagcctgcctttgggccttgcttctccatgcccagaggcaagccccccgccccatcccctaggggacagaaagccagcccccctaccttagcccctgccactgccagtccccccaccactgcggggagcaacaacccctgcctcacacagctgctcacagcagctaagccggagcaagccctggagccaccacttgtatccagcaccctcctccggtccccagggtccccgcaggagacagtccctgaattcccctgcacattccttcccccgaccccggcccctacaccgccccggccacctccaggcccggccacattggccccttccaggcccctgcttgtccccaaagcggagcggctctcacccccagcgcccagcggtaaagagaggggttgcagggattgggggaatctaggggatgaggggaagaggaggaagaagaaggggactgggtctggggccagatgagaggaagggggcaatggggaccctttcccctgggtcggtctttctgtgggtctgtctgtccctaccacaggcagtgaacggcggctgtcaggggacctcagctccatgccaggccctgggactctgagcgtccgtgtctctcccccgcaacccatcctcagccggggccgtccagacagcaacaagaccgagaaccggcgtatcacacacatctccgcggagcagaagcggcgcttcaacatcaagctggggtttgacacccttcatgggctcgtgagcacactcagtgcccagcccagcctcaaggtgagcaaagctaccacgctgcagaagacagctgagtacatccttatgctacagcaggagcgtgcgggcttgcaggaggaggcccagcagctgcgggatgagattgaggagctcaatgccgccattaacctgtgccagcagcagctgcccgccacaggggtacccatcacacaccagcgttttgaccagatgcgagacatgtttgatgactacgtccgaacccgtacgctgcacaactggaagttctgggtgttcagcatcctcatccggcctctgtttgagtccttcaacgggatggtgtccacggcaagtgtgcacaccctccgccagacctcactggcctggctggaccagtactgctctctgcccgctctccggccaactgtcctgaactccctacgccagctgggcacatctaccagtatcctgaccgacccgggccgcatccctgagcaagccacacgggcagtcacagagggcacccttggcaaacctttatagtcctggccagaccctgctgctcactcagctgccctgggggctgctttccctgggcacgggctccagggatcatctctgggcactcccttcctgccccaggccctggctctgcccttccctggggggtggagcagggtccaggtttcacacttgccacctcctggaggtcaagaagagcagagtccccgtccctgctctgccactgtgctccagcaccgtgaccttgggtgactcgtccgctgtctttggaccgctgtgtttcaatctgcaaaatggggatggggaaggttcaatcagcagatgacccccaggccttggcagctgtgacattgggggcctaggctggcaactccgggggctcaacggtggaaagaggaggatgctgtttctctgtcacctccacttgctccccgacaggtggggcacagacctctgttcctgagcagagaagcagaaaaggaggttccctctctctgctccttcactgctgacccagaggggctgcaggatggtttcccctgggagaggccaggagggcctgatcccaggagacaccagggccagagtgaccacagcagggcaggcatcatgtgtgtgtgtgtgtgtggatgtgtgtgtgtgggttttgtaaagaattcttgaccaataaaagcaaaaactgtctgctgg

SEQ ID NO: 27 - DNA, 3837 bp, Homo sapien
agctgttccccgcgctgcgcggagcagggaccaggcggttgcggcggcgacagccatggccggcgcgctggcaggtctggccgcgggcttgcaggtcccgcgggtcgcgcccagcccagactcggactcggacacagactcggaggacccgagtctccggcgcagcgcgggcggcttgctccgctcgcaggtcatccacagcggtcacttcatggtgtcgtcgccgcacagcgactcgctgccccggcggcgcgaccaggaggggtccgtggggccctccgacttcgggccgcgcagtatcgaccccacactcacacgcctcttcgagtgcttgagcctggcctacagtggcaagctggtgtctcccaagtggaagaatttcaaaggcctcaagctgctctgcagagacaagatccgcctgaacaacgccatctggagggcctggtatatccagtatgtgaagcggaggaagagccccgtgtgtggcttcgtgacccccctgcaggggcctgaggctgatgcgcaccggaagccggaggccgtggtcctggaggggaactactggaagcggcgcatcgaggtggtgatgcgggaataccacaagtggcgcatctactacaagaagcgggtcagtgggggagggccagggaggccccagagctttcctcctgcggctgccggctaccgcccgcctcggaagatccctggaaaggggatcctgacccccgagcttgcgcccctcgggccctccattcagtcccgggccgacagcgccaccgtgtggccacagcgtctcctagcggcctccttacctaggggtcgggtgagctcctgatgggaaatgggggatctcatcgcttgtgagtagaggagactttggggggaaagtgatggaggatggggcaagggatccggtgtccaactctgtgtgtccctgcagctccgtaagcccagcagggaagatgacctcctggcccctaagcaggcggaaggcaggtggccgccgccggagcaatggtgcaaacagctcttctccagtgtggtccccgtgctgctgggggacccagaggaggagccgggtgggcggcagctcctggacctcaattgctttttgtccgacatctcggacactctcttcaccatgactcagtccggcccttcgcccctgcagctgccgcctgaggatgcctacgtcggcaatgctgacatgatccagccggacctgacgccactgcagccaagcctggatgacttcatggacatctcagatttctttaccaactcccgcctcccacagccgcccatgccttcaaacttcccagagccccccagcttcagccccgtggttgactccctcttcagcagtgggaccctgggcccagaggtgcccccggcttcctcggccatgacccacctctctggacacagccgtctgcaggctcggaacagctgccctggccccttggactccagcgccttcctgagttctgatttcctccttcctgaagaccccaagccccggctcccaccccctcctgtacccccacctctgctgcattaccctccccctgccaaggtgccaggcctggagccctgccccccacctcccttccctcccatggcaccacccactgctttgctgcaggaagagcctctcttctctcccaggtttcccttccccaccgtccctcctgccccaggagtgtctccgctgcctgctcctgcagccttcccacccaccccacagtctgtccccagcccagcccccacccccttccccatagagcttctacccttggggtattcggagcctgcctttgggccttgcttctccatgcccagaggcaagccccccgccccatcccctaggggacagaaagccagcccccctaccttagcccctgccactgccagtccccccaccactgcggggagcaacaacccctgcctcacacagctgctcacagcagctaagccggagcaagccctggagccaccacttgtatccagcaccctcctccggtccccagggtccccgcaggagacagtccctgaattcccctgcacattccttcccccgaccccggcccctacaccgccccggccacctccaggcccggccacattggccccttccaggcccctgcttgtccccaaagcggagcggctctcacccccagcgcccagcggtaaagagaggggttgcagggattgggggaatctaggggatgaggggaagaggaggaagaagaaggggactgggtctggggccagatgagaggaagggggcaatggggaccctttcccctgggtcggtctttctgtgggtctgtctgtccctaccacaggcagtgaacggcggctgtcaggggacctcagctccatgccaggccctgggactctgagcgtccgtgtctctcccccgcaacccatcctcagccggggccgtccagacagcaacaagaccgagaaccggcgtatcacacacatctccgcggagcagaagcggcgcttcaacatcaagctggggtttgacacccttcatgggctcgtgagcacactcagtgcccagcccagcctcaaggtgagcaaagctaccacgctgcagaagacagctgagtacatccttatgctacagcaggagcgtgcgggcttgcaggaggaggcccagcagctgcgggatgagattgaggagctcaatgccgccattaacctgtgccagcagcagctgcccgccacaggggtacccatcacacaccagcgttttgaccagatgcgagacatgtttgatgactacgtccgaacccgtacgctgcacaactggaagttctgggtgttcagcatcctcatccggcctctgtttgagtccttcaacgggatggtgtccacggcaagtgtgcacaccctccgccagacctcactggcctggctggaccagtactgctctctgcccgctctccggccaactgtcctgaactccctacgccagctgggcacatctaccagtatcctgaccgacccgggccgcatccctgagcaagccacacgggcagtcacagagggcacccttggcaaacctttatagtcctggccagaccctgctgctcactcagctgccctgggggctgctttccctgggcacgggctccagggatcatctctgggcactcccttcctgccccaggccctggctctgcccttccctggggggtggagcagggtccaggtttcacacttgccacctcctggaggtcaagaagagcagagtccccgtccctgctctgccactgtgctccagcaccgtgaccttgggtgactcgtccgctgtctttggaccgctgtgtttcaatctgcaaaatggggatggggaaggttcaatcagcagatgacccccaggccttggcagctgtgacattgggggcctaggctggcaactccgggggctcaacggtggaaagaggaggatgctgtttctctgtcacctccacttgctccccgacaggtggggcacagacctctgttcctgagcagagaagcagaaaaggaggttccctctctctgctccttcactgctgacccagaggggctgcaggatggtttcccctgggagaggccaggagggcctgatcccaggagacaccagggccagagtgaccacagcagggcaggcatcatgtgtgtgtgtgtgtgtggatgtgtgtgtgtgggttttgtaaagaattcttgaccaataaaagcaaaaactgtctgctggaaaaaaaaaaaatacttgaaaaactgaaagcttaatggagcgttactaaccttaaaagaaaggagtactttgacatttaaaaa

SEQ ID NO: 28 - DNA, 1060 bp, Homo sapien
gttctcccttgtcctggccctgggcctctagtcacttcctgcttcccaccaacagtttctccttacccccacccaggtcctggatggtcgccggcccacaggggggcgactggaggtaatggtccggattcgggagccactgacagcccagcagttggagacgacgacagagagcaggttgctgggcccaaagggaaggcccctcctgtgcctgcccctgcaagggagtcagggaacagatcagcccggcccctgcatagcctcagtgtgctggcgtttgaccaagagcgtctggagcggaagatcctggccctcaggcaggcgcggcggccggtgcccccagaagtggcccagcagtaccaggacatcatgcaacgcagccagtggcagagggcacagctggagcaggggggtgtgggcatccgacgggaatacgcagcccagctggagcggcagctgcagttctacacggaggctgcccggcgcctgggcaacgatggcagcagggatgctgcaaaggaggcgctctataggcggaatctggtagagagtgagctgcagcggctccgcaggtgaggagcccatggggcgggcagcccccagaaagcgggcagcaggccccgataccgggaagagccgacacagccacgaaccagacaagcagacaatcagcggacaatcggttctggactcacccctcatccgggcccccagccccgccagagcctccgtggctgcgggtgttgggaaccatgcctgccagccagtatgtgcccctcacccaggcctggctgggccctggagagtcctgtttgcacagcccaggggtgtccggcctctggcccgccccggagcagggagggtggctggggccaagccccgagggcccctgcaagcactttacttcctgttcctccccagccttaaccccaaagccctcctgcaccccaaagaagccactgaggctggccgagccacactgtctccccaggggcgtcgacctggcccagctgggtccccagggccagcacatggaataaaatagccagggccacactca

SEQ ID NO: 29 - DNA, 840 bp, Homo sapien
gggaggggctcggggatgggcacctggagggggaggggctcggggatgggcacctggagggggaggggctcggggatgggcacctggagggggaggggctcggggatgggcacctggcgggggacgggcttggggatgggcacagtccaggagggttgtgggcagtgaggccccaccctaagcctccattcccccgccatccattctcagaatacgcagcccagctggagcggcagctgcagttctacacggaggctgcccggcgcctgggcaacgatggcagcagggatgctgcaaaggaggcgctctataggcggaatctggtagagagtgagctgcagcggctccgcaggtgaggagcccatggggcgggcagcccccagaaagcgggcagcaggccccgataccgggaagagccgacacagccacgaaccagacaagcagacaatcagcggacaatcggttctggactcacccctcatccgggcccccagccccgccagagcctccgtggctgcgggtgttgggaaccatgcctgccagccagtatgtgcccctcacccaggcctggctgggccctggagagtcctgtttgcacagcccaggggtgtccggcctctggcccgccccggagcagggagggtggctggggccaagccccgagggcccctgcaagcactttacttcctgttcctccccagccttaaccccaaagccctcctgcaccccaaagaagccactgaggctggccgagccacactgtctccccaggggcgtcgacctggcccagctgggtccccagggccagcacatggaataaaatagccagggccacactca

SEQ ID NO: 30 - DNA, 927 bp, Homo sapien
gggaggggctcggggatgggcacctggagggggaggggctcggggatgggcacctggagggggaggggctcggggatgggcacctggagggggaggggctcggggatgggcacctggcgggggacgggcttggggatgggcacagtccaggagggttgtgggcagtgaggccccaccctaagcctccattcccccgccatccattctcagaatacgcagcccagctggagcggcagctgcagttctacacggaggctgcccggcgcctgggcaacgatggcagcagggtgagctggtcgcgggccgggtgggcactgggcagcgggcagggtggggcctgcagggactacctgctgaatgcccatcccccacaggatgctgcaaaggaggcgctctataggcggaatctggtagagagtgagctgcagcggctccgcaggtgaggagcccatggggcgggcagcccccagaaagcgggcagcaggccccgataccgggaagagccgacacagccacgaaccagacaagcagacaatcagcggacaatcggttctggactcacccctcatccgggcccccagccccgccagagcctccgtggctgcgggtgttgggaaccatgcctgccagccagtatgtgcccctcacccaggcctggctgggccctggagagtcctgtttgcacagcccaggggtgtccggcctctggcccgccccggagcagggagggtggctggggccaagccccgagggcccctgcaagcactttacttcctgttcctccccagccttaaccccaaagccctcctgcaccccaaagaagccactgaggctggccgagccacactgtctccccaggggcgtcgacctggcccagctgggtccccagggccagcacatggaataaaatagccagggccacactca

SEQ ID NO: 31 - DNA, 3373 bp, Homo sapien
cagcccctggagcttctccgggcagaagaggaggtgggctggactgtcaaagaaagtggctggcttccgtgggcaatccgaggttcctagtggccctctgcagaaagctgaactcccagttcccccaggcctccgtcccgcggcggactcctaggcttcctccctccctgtcgccgccagcctctcgctctccccgtcttccgcccgcactctctgggcagggctgcggccaggacccgcccccgcgtcccgcccgaccctccgccaggggtcacttcccctgtccaggtttcagcttccacatgtgtcaagcggctggctcagcccagagtccctgtctcccgcccgccggcccgagccgccgcccctcccccgcctcccgtgcgcccgggacaatcctcgccttgtctgtggcgccggcatctggagctttctgtagcctccggatacgcctttttttcagggcgtagccccagccaagctgctccccgcggcggccgcacagcagcccgagcgccccctttccagagctcccctccggagctgggatccaggcgcgtagcggagatcccaggatcctgggtgctgtctgggcccgctccccaccatgacctcctcggggcctggaccccggttcctgctgctgctgccgctgctgctgccccctgcggcctcagcctccgaccggccccggggccgagacccggtcaacccagagaagctgctggtgatcactgtggccacagctgaaaccgaggggtacctgcgtttcctgcgctctgcggagttcttcaactacactgtgcggaccctgggcctgggagaggagtggcgagggggtgatgtggctcgaacagttggtggaggacagaaggtccggtggttaaagaaggaaatggagaaatacgctgaccgggaggatatgatcatcatgtttgtggatagctacgacgtgattctggccggcagccccacagagctgctgaagaagttcgtccagagtggcagccgcctgctcttctctgcagagagcttctgctggcccgagtgggggctggcggagcagtaccctgaggtgggcacggggaagcgcttcctcaattctggtggattcatcggttttgccaccaccatccaccaaatcgtgcgccagtggaagtacaaggatgatgacgacgaccagctgttctacacacggctctacctggacccaggactgagggagaaactcagccttaatctggatcataagtctcggatctttcagaacctcaacggggctttagatgaagtggttttaaagtttgatcggaaccgtgtgcgtatccggaacgtggcctacgacacgctccccattgtggtccatggaaacggtcccactaagctgcagctcaactacctgggaaactacgtccccaatggctggactcctgagggaggctgtggcttctgcaaccaggaccggaggacactcccgggggggcagcctcccccccgggtgtttctggccgtgtttgtggaacagcctactccgtttctgccccgcttcctgcagcggctgctactcctggactatccccccgacagggtcacccttttcctgcacaacaacgaggtcttccatgaaccccacatcgctgactcctggccgcagctccaggaccacttctcagctgtgaagctcgtggggccggaggaggctctgagcccaggcgaggccagggacatggccatggacctgtgtcggcaggaccccgagtgtgagttctacttcagcctggacgccgacgctgtcctcaccaacctgcagaccctgcgtatcctcattgaggagaacaggaaggtgatcgcccccatgctgtcccgccacggcaagctgtggtccaacttctggggcgccctgagccccgatgagtactacgcccgctccgaggactacgtggagctggtgcagcggaagcgagtgggtgtgtggaatgtaccatacatctcccaggcctatgtgatccggggtgataccctgcggatggagctgccccagagggatgtgttctcgggcagtgacacagacccggacatggccttctgtaagagctttcgagacaagggcatcttcctccatctgagcaatcagcatgaatttggccggctcctggccacttccagatacgacacggagcacctgcaccccgacctctggcagatcttcgacaaccccgtcgactggaaggagcagtacatccacgagaactacagccgggccctggaaggggaaggaatcgtggagcagccatgcccggacgtgtactggttcccactgctgtcagaacaaatgtgtgatgagctggtggcagagatggagcactacggccagtggtcaggcggccggcatgagactgcactgcaggaatgcctcatgccggtcgagctctgccctgctgtgagcagcagccaccacacagcttctaaggctgcgatgagcagcctgggtgcaatagaagccacggggaagccttgacccagacttgggaggagtagggagcttcacaggacaggtgacatcttagctgagacttgaagggccgggagcagtgagtcaggccgagaagtagcaaagaagactgttctgcacagaggaacacaggtgtgaaggctggaggacgggaggaaggaggctggactgccctggggtggggagcgccatggctggaggggcgggtggctcagtgcccgccgcccccaggattcaaggctggctggaggctacgagaatgtgcccaccgtggacatccacatgaagcaggtggggtacgaggaccagtggctgcagctgctgcggacgtatgtgggccccatgaccgagagcctgtttcccggttaccacaccaaggcgcgggcggtgatgaactttgtggttcgctaccggccagacgagcagccgtctctgcggccacaccacgactcatccaccttcaccctcaacgttgccctcaaccacaagggcctggactatgagggaggtggctgccgcttcctgcgctacgactgtgtgatctcctccccgaggaagggctgggcactcctgcaccccggccgcctcacccactaccacgaggggctgccaacgacctggggcacacgctacatcatggtgtcctttgtcgacccctgacactcaaccactccgcccacaggggttcgtgggcacagggcttctggggactccccgcgtgataaattattaatgttccgcagtctcactctgaataaaggacagtttgtaagtcttgaaataataaaatagaatggcctctgtgggcctcacggagtggtgcttatctgggccgttccttttattgtagggtaaattaat

SEQ ID NO: 32 - DNA, 2655 bp, Homo sapien
cagcccctggagcttctccgggcagaagaggaggtgggctggactgtcaaagaaagtggctggcttccgtgggcaatccgaggttcctagtggccctctgcagaaagctgaactcccagttcccccaggcctccgtcccgcggcggactcctaggcttcctccctccctgtcgccgccagcctctcgctctccccgtcttccgcccgcactctctgggcagggctgcggccaggacccgcccccgcgtcccgcccgaccctccgccaggggtcacttcccctgtccaggtttcagcttccacatgtgtcaagcggctggctcagcccagagtccctgtctcccgcccgccggcccgagccgccgcccctcccccgcctcccgtgcgcccgggacaatcctcgccttgtctgtggcgccggcatctggagctttctgtagcctccggatacgcctttttttcagggcgtagccccagccaagctgctccccgcggcggccgcacagcagcccgagcgccccctttccagagctcccctccggagctgggatccaggcgcgtagcggagatcccaggatcctgggtgctgtctgggcccgctccccaccatgacctcctcggggcctggaccccggttcctgctgctgctgccgctgctgctgccccctgcggcctcagcctccgaccggccccggggccgagacccggtcaacccagagaagctgctggtgatcactgtggccacagctgaaaccgaggggtacctgcgtttcctgcgctctgcggagttcttcaactacactgtgcggaccctgggcctgggagaggagtggcgagggggtgatgtggctcgaacagttggtggaggacagaaggtccggtggttaaagaaggaaatggagaaatacgctgaccgggaggatatgatcatcatgtttgtggatagctacgacgtgattctggccggcagccccacagagctgctgaagaagttcgtccagagtggcagccgcctgctcttctctgcagagagcttctgctggcccgagtgggggctggcggagcagtaccctgaggtgggcacggggaagcgcttcctcaattctggtggattcatcggttttgccaccaccatccaccaaatcgtgcgccagtggaagtacaaggatgatgacgacgaccagctgttctacacacggctctacctggacccaggactgagggagaaactcagccttaatctggatcataagtctcggatctttcagaacctcaacggggctttagatgaagtggttttaaagtttgatcggaaccgtgtgcgtatccggaacgtggcctacgacacgctccccattgtggtccatggaaacggtcccactaagctgcagctcaactacctgggaaactacgtccccaatggctggactcctgagggaggctgtggcttctgcaaccaggaccggaggacactcccgggggggcagcctcccccccgggtgtttctggccgtgtttgtggaacagcctactccgtttctgccccgcttcctgcagcggctgctactcctggactatccccccgacagggtcacccttttcctgcacaacaacgaggtcttccatgaaccccacatcgctgactcctggccgcagctccaggaccacttctcagctgtgaagctcgtggggccggaggaggctctgagcccaggcgaggccagggacatggccatggacctgtgtcggcaggaccccgagtgtgagttctacttcagcctggacgccgacgctgtcctcaccaacctgcagaccctgcgtatcctcattgaggagaacaggaaggtgatcgcccccatgctgtcccgccacggcaagctgtggtccaacttctggggcgccctgagccccgatgagtactacgcccgctccgaggactacgtggagctggtgcagcggaagcgagtgggtgtgtggaatgtaccatacatctcccaggcctatgtgatccggggtgataccctgcggatggagctgccccagagggatgtgttctcgggcagtgacacagacccggacatggccttctgtaagagctttcgagacaagggcatcttcctccatctgagcaatcagcatgaatttggccggctcctggccacttccagatacgacacggagcacctgcaccccgacctctggcagatcttcgacaaccccgtcgactggaaggagcagtacatccacgagaactacagccgggccctggaaggggaaggaatcgtggagcagccatgcccggacgtgtactggttcccactgctgtcagaacaaatgtgtgatgagctggtggcagagatggagcactacggccagtggtcaggcggccggcatgaggtaagggcctgggcgaggagggcagaggccttcccagaggaggaggtgcaggatctggtaaacaaacaatggaatcaggaaaatgggagcaaagaggggttcccaggggggaggcagaccctggggtcacaactgcattcattcatgtattcaagaaatatttactgctgggcacagtggctcatgcctgtaatcctagcactttgggaggctgaggcgggaggattgctcgagcagggggagtttgaggccagcctggg

SEQ ID NO: 33 - DNA, 2570 bp, Homo sapien
cagcccctggagcttctccgggcagaagaggaggtgggctggactgtcaaagaaagtggctggcttccgtgggcaatccgaggttcctagtggccctctgcagaaagctgaactcccagttcccccaggcctccgtcccgcggcggactcctaggcttcctccctccctgtcgccgccagcctctcgctctccccgtcttccgcccgcactctctgggcagggctgcggccaggacccgcccccgcgtcccgcccgaccctccgccaggggtcacttcccctgtccaggtttcagcttccacatgtgtcaagcggctggctcagcccagagtccctgtctcccgcccgccggcccgagccgccgcccctcccccgcctcccgtgcgcccgggacaatcctcgccttgtctgtggcgccggcatctggagctttctgtagcctccggatacgcctttttttcagggcgtagccccagccaagctgctccccgcggcggccgcacagcagcccgagcgccccctttccagagctcccctccggagctgggatccaggcgcgtagcggagatcccaggatcctgggtgctgtctgggcccgctccccaccatgacctcctcggggcctggaccccggttcctgctgctgctgccgctgctgctgccccctgcggcctcagcctccgaccggccccggggccgagacccggtcaacccagagaagctgctggtgatcactgtggccacagctgaaaccgaggggtacctgcgtttcctgcgctctgcggagttcttcaactacactgtgcggaccctgggcctgggagaggagtggcgagggggtgatgtggctcgaacagttggtggaggacagaaggtccggtggttaaagaaggaaatggagaaatacgctgaccgggaggatatgatcatcatgtttgtggatagctacgacgtgattctggccggcagccccacagagctgctgaagaagttcgtccagagtggcagccgcctgctcttctctgcagagagcttctgctggcccgagtgggggctggcggagcagtaccctgaggtgggcacggggaagcgcttcctcaattctggtggattcatcggttttgccaccaccatccaccaaatcgtgcgccagtggaagtacaaggatgatgacgacgaccagctgttctacacacggctctacctggacccaggactgagggagaaactcagccttaatctggatcataagtctcggatctttcagaacctcaacggggctttagatgaagtggttttaaagtttgatcggaaccgtgtgcgtatccggaacgtggcctacgacacgctccccattgtggtccatggaaacggtcccactaagctgcagctcaactacctgggaaactacgtccccaatggctggactcctgagggaggctgtggcttctgcaaccaggaccggaggacactcccgggggggcagcctcccccccgggtgtttctggccgtgtttgtggaacagcctactccgtttctgccccgcttcctgcagcggctgctactcctggactatccccccgacagggtcacccttttcctgcacaacaacgaggtcttccatgaaccccacatcgctgactcctggccgcagctccaggaccacttctcagctgtgaagctcgtggggccggaggaggctctgagcccaggcgaggccagggacatggccatggacctgtgtcggcaggaccccgagtgtgagttctacttcagcctggacgccgacgctgtcctcaccaacctgcagaccctgcgtatcctcattgaggagaacaggaaggtgatcgcccccatgctgtcccgccacggcaagctgtggtccaacttctggggcgccctgagccccgatgagtactacgcccgctccgaggactacgtggagctggtgcagcggaagcgagtgggtgtgtggaatgtaccatacatctcccaggcctatgtgatccggggtgataccctgcggatggagctgccccagagggatgtgttctcgggcagtgacacagacccggacatggccttctgtaagagctttcgagacaagggcatcttcctccatctgagcaatcagcatgaatttggccggctcctggccacttccagatacgacacggagcacctgcaccccgacctctggcagatcttcgacaaccccgtcgactggaaggagcagtacatccacgagaactacagccgggccctggaaggggaaggaatcgtggagcagccatgcccggacgtgtactggttcccactgctgtcagaacaaatgtgtgatgagctggtggcagagatggagcactacggccagtggtcaggcggccggcatgagtggkraggtacraatggggccgggcctcacatgaaaggggggcccggccaggtgatcgggagtttggccgacaacctggcggccacaggcggcgggaagggtccggccaaaagtggcccaaaccaccagcacagggcaaggggccagaccgggacgccaaaaggggacacggggc

SEQ ID NO: 34 - DNA, 1683 bp, Homo sapien
gcattccagcctgggtgacagagcaagactccgtctcaaaaaccaaaaacaagaaacaaaaaagaagtgccacagcttggggtaggaactgaccgcattttgggaggtggggtggttgggaccagcagtgcttgacaagggacatgcaggggccttatgttcagggactgggataccctgagggaagaaggacttcccgggatgagctgggcagaatttggggggctgtcctcccagctgaccgcggtgtcggtgcctccagggggggtgtgtggaatgtaccatacatctcccaggcctatgtgatccggggtgataccctgcggatggagctgccccagagggatgtgttctcgggcagtgacacagacccggacatggccttctgtaagagctttcgagacaaggtgagcgcgggtgcacggtctggcctgggggcagtcccccagactccaggcatcgcctgcatcacggacacccccaccccactacaggcatcttcctccatctgagcaatcagcatgaatttggccggctcctggccacttccagatacgacacggagcacctgcaccccgacctctggcagatcttcgacaaccccgtcgtgagtggggaccccacgcccagagcacacaggttccccgccttgtgctaaggaagacaccaaacgtgatggctgctgccagcgcaggacactgagtgggagggggcggtcccctgggggctgggagcgaggggggcacagatctgatgtgccccccaccctctcacaggactggaaggagcagtacatccacgagaactacagccgggccctggaaggggaaggaatcgtggagcagccatgcccggacgtgtactggttcccactgctgtcagaacaaatgtgtgatgagctggtggcagagatggagcactacggccagtggtcaggcggccggcatgaggattcaaggctggctggaggctacgagaatgtgcccaccgtggacatccacatgaagcaggtggggtacgaggaccagtggctgcagctgctgcggacgtatgtgggccccatgaccgagagcctgtttcccggttaccacaccaaggcgcgggcggtgatgaactttgtggttcgctaccggccagacgagcagccgtctctgcggccacaccacgactcatccaccttcaccctcaacgttgccctcaaccacaagggcctggactatgagggaggtggctgccgcttcctgcgctacgactgtgtgatctcctccccgaggaagggctgggcactcctgcaccccggccgcctcacccactaccacgaggggctgccaacgacctggggcacacgctacatcatggtgtcctttgtcgacccctgacactcaaccactctgccaaacctgccctgccattgtgcctttttagggggcctggcccccgtcctgggagttgggggatgggtctctctgtctccccacttcctgagttcatgttccgcgtgcctgaactgaatatgtcaccttgctcccaagacacggccctctcaggaagctcccggagtccccgcctctctcctccgcccacaggggttcgtgggcacagggcttctggggactccccgcgtgataaattattaatgttccgcagtctcactctgaataaaggacagtttgtaagtcttga

SEQ ID NO: 35 - DNA, 2040 bp, Homo sapien
  misc_feature (2040)..(2040): n=a, c, g or t
gcggccgcagctcagagccgtggcctctccgaagtggcagatggggcgggcgcggccagagcaagtgccaggcgggaacagagggactgggcgcgcctcacaactcaccacctcgcccgctggtccttcctggctcgcctggctctgaagctgcacctggaggggaaacctcagaacagtaggcgggattgcctagtaaatatctcccattcagggaggcccaggtcgtgtgacgtcgacagttgctgggtagatgaggccaacacaggttgcaagaagaggcggggtttagaggcgtgaaactccgcagtgctcagccaagcagggagcaacgctaggaagggcgggcagaaagggcacgctcttgtgggtgactacaggttaggagaccgttgaacctggaggggccctaggatggaccccgtggaaagattcagagactgcgccctctccctggcgccgccttcccctacacgcggcgggtatattctgttgcagttggcccaggacctgtttccaagactctgccccctcgcacttccgtccctcctggttttgtaaagtgatgctcataggaacccccaccccgcgtgacactactcccagctcctggctgacttctagtcttctggttgaagctgcgcctttagatgacacgaccctacccacccctgtttccagcggatgcccgggcctggagtacctcttactgtaacccatcgccaagtgggcttttgaaggcgcctgttcctttctcgctttcttcggaagacccttgacccatcattcccccgacccccataacgggagagcagagaagccggtccccagtgtgatggtcctggtccaggcactaactgtccttttctcggaaaaggcagggggatgtggaaaagagtcttgttccctccccttcgatctgtggctttcgctttcacttcctcctccgagagcggacagatctctgggtgctgggcggtcatggcgctactagatgtatgcggagcccccgagggcagcggccggaatcggctctcccggttgcgggaagcgggcgtcgctcggacccaggacactacagtttctctatgcgatctccagagctcgctttaccccggggaatgcagcccacagaattcttccagtccctgggtggggacggagaaaggaacgttcagattgagatggcccatggcaccaccacgctcgccttcaagttccagcatggagtgattgcagcagtggattctcgggcctcagctgggtcctacattagtgccttacgggtgaacaaggtgattgagattaacccttacctgcttggcaccatgtctggctgtgcagcagactgtcagtactgggagcgcctgctggccaaggaatgcaggctgtactatctgcgaaatggagaacgtatttcagtgtcggcagcctccaagctgctgtccaacatgatgtgccagtaccggggcatgggcctctctatgggcagtatgatctgtggctgggataagaagggtcctggactctactacgtggatgaacatgggactcggctctcaggaaatatgttctccacgggtagtgggaacacttatgcctacggggtcatggacagtggctatcggcctaatcttagccctgaagaggcctatgaccttggccgcagggctattgcttatgccactcacagagacagctattctggaggcgttgtcaatatgtccactgtcagcagctggtcgcgggccacttgaacgtcccatgtcttgccccgtgtgcccttccgggagcgcctccattgcggccggcgccggggggcgtcccgggaggacatgcggccctccggggcacacacttagtcctgggaaaaaaggcgtcgtgtgccaacaaaaggtcgtctccacaagcgggaagcatatgggtcgttataaatcacgcgtgtgtgccgccaaaatgataataataggaggaggctcgacgccctatccatataacggctcacgcgtccatacttcttattactaatttattcttcgn

SEQ ID NO: 36 - DNA, 1912 bp, Homo sapien
gcggccgcagctcagagccgtggcctctccgaagtggcagatggggcgggcgcggccagagcaagtgccaggcgggaacagagggactgggcgcgcctcacaactcaccacctcgcccgctggtccttcctggctcgcctggctctgaagctgcacctggaggggaaacctcagaacagtaggcgggattgcctagtaaatatctcccattcagggaggcccaggtcgtgtgacgtcgacagttgctgggtagatgaggccaacacaggttgcaagaagaggcggggtttagaggcgtgaaactccgcagtgctcagccaagcagggagcaacgctaggaagggcgggcagaaagggcacgctcttgtgggtgactacaggttaggagaccgttgaacctggaggggccctaggatggaccccgtggaaagattcagagactgcgccctctccctggcgccgccttcccctacacgcggcgggtatattctgttgcagttggcccaggacctgtttccaagactctgccccctcgcacttccgtccctcctggttttgtaaagtgatgctcataggaacccccaccccgcgtgacactactcccagctcctggctgacttctagtcttctggttgaagctgcgcctttagatgacacgaccctacccacccctgtttccagcggatgcccgggcctggagtacctcttactgtaacccatcgccaagtgggcttttgaaggcgcctgttcctttctcgctttcttcggaagacccttgacccatcattcccccgacccccataacgggagagcagagaagccggtccccagtgtgatggtcctggtccaggcactaactgtccttttctcggaaaaggcagggggatgtggaaaagagtcttgttccctccccttcgatctgtggctttcgctttcacttcctcctccgagagcggacagatctctgggtgctgggcggtcatggcgctactagatgtatgcggagcccccgagggcagcggccggaatcggctctcccggttgcgggaagcgggcgtcgctcggacccaggacactacagtttctctatgcgatctccagagctcgctttaccccggggaatgcagcccacagaattcttccagtccctgggtggggacggagaaaggaacgttcagattgagatggcccatggcaccaccacgctcgccttcaagttccagcatggagtgattgcagcagtggattctcgggcctcagctgggtcctacattagtgccttacgggtgaacaaggtgattgagattaacccttacctgcttggcaccatgtctggctgtgcagcagactgtcagtactgggagcgcctgctggccaaggaatgcaggctgtactatctgcgaaatggagaacgtatttcagtgtcggcagcctccaagctgctgtccaacatgatgtgccagtaccggggcatgggcctctctatgggcagtatgatctgtggctgggataagaagggtcctggactctactacgtggatgaacatgggactcggctctcaggaaatatgttctccacgggtagtgggaacacttatgcctacggggtcatggacagtggctatcggcctaatcttagccctgaagaggcctatgaccttggccgcagggctattgcttatgccactcacagagacagctattctggaggcgttgtcaatatccctgaggaatggtggtgacagtgaacggcccttcggccgcgccagtcgggaccaccaaggggggggcgggcgtccccggggtgggagcggcacacctttccgaaaaagtcgcaaggtgtccagagggggttgtttaaaccagtggccgaagaaagggcccgctgcgtactggcgttcttcaacttatt

SEQ ID NO: 37 - DNA, 1797 bp, Homo sapien
gcggccgcagctcagagccgtggcctctccgaagtggcagatggggcgggcgcggccagagcaagtgccaggcgggaacagagggactgggcgcgcctcacaactcaccacctcgcccgctggtccttcctggctcgcctggctctgaagctgcacctggaggggaaacctcagaacagtaggcgggattgcctagtaaatatctcccattcagggaggcccaggtcgtgtgacgtcgacagttgctgggtagatgaggccaacacaggttgcaagaagaggcggggtttagaggcgtgaaactccgcagtgctcagccaagcagggagcaacgctaggaagggcgggcagaaagggcacgctcttgtgggtgactacaggttaggagaccgttgaacctggaggggccctaggatggaccccgtggaaagattcagagactgcgccctctccctggcgccgccttcccctacacgcggcgggtatattctgttgcagttggcccaggacctgtttccaagactctgccccctcgcacttccgtccctcctggttttgtaaagtgatgctcataggaacccccaccccgcgtgacactactcccagctcctggctgacttctagtcttctggttgaagctgcgcctttagatgacacgaccctacccacccctgtttccagcggatgcccgggcctggagtacctcttactgtaacccatcgccaagtgggcttttgaaggcgcctgttcctttctcgctttcttcggaagacccttgacccatcattcccccgacccccataacgggagagcagagaagccggtccccagtgtgatggtcctggtccaggcactaactgtccttttctcggaaaaggcagggggatgtggaaaagagtcttgttccctccccttcgatctgtggctttcgctttcacttcctcctccgagagcggacagatctctgggtgctgggcggtcatggcgctactagatgtatgcggagcccccgagggcagcggccggaatcggctctcccggttgcgggaagcgggcgtcgctcggacccaggacactacagtttctctatgcgatctccagagctcgctttaccccggggaatgcagcccacagaattcttccagtccctgggtggggacggagaaaggaacgttcagattgagatggcccatggcaccaccacgctcgccttcaagttccagcatggagtgattgcagcagtggattctcgggcctcagctgggtcctacattagtgccttacgggtgaacaaggtgattgagattaacccttacctgcttggcaccatgtctggctgtgcagcagactgtcagtactgggagcgcctgctggccaaggaatgcaggctgtactatctgcgaaatggagaacgtatttcagtgtcggcagcctccaagctgctgtccaacatgatgtgccagtaccggggcatgggcctctctatgggcagtatgatctgtggctgggataagaagggtcctggactctactacgtggatgaacatgggactcggctctcaggaaatatgttctccacgggtagtgggaacacttatgcctacggggtcatggacagtggctatcggcctaatcttagccctgaagaggcctatgaccttggccgcagggctattgcttatgccactcacagagacagctattctggaggcgttgtcaatatgtaccacattgarcgagatggtkggtgaaagtaaagtcgatgtggacctgtgcccgccggaagcccaaagtggg

SEQ ID NO: 38 - DNA, 1713 bp, Homo sapien
ttaactaggtcactgtagtacctctccagcaggcacctgggcactgccctccattgtccccactcctgcagcacttgccaggacccagtccccagtccccagtccccagggcttggtggtacttgcagtgtcttgtgatgctttgaagacaccagctttgaagcaaaaagttctaggtctgctttccacttaagccccatcttaactgtatgaccttggacatgtcactagacttgctttagtgtctccatctgtaaaatggggataaagatggactcttctctcccaaatgcccagcatgatgtgcagggcctgtccccccaggagaacctgtctcaccatccttccccacttcctcccacccccaggtgtgccagaaatcaggcgagatctccctgctgaagcagcagctgaaagagtctcaggcagagctggtgcagaagggcagcgagctggtggctctgcgggtggcgctgcgggaggcccgtgctacgctgcgggtcagtgagggccgtgcgcggggtctacaggaggccgcccgagctcgggagctggagctggaagcctgttcccaggagctgcagcgacaccgccaggaagctgagcagctgcgggagaaagctgggcagttggatgctgaggcggccggactccgggagccccctgtgccacctgccaccgctgacccattcctcctggcagagagtgatgaggccaaagtgcagcgggcagcagccggggttgggggcagcttgcgggcccaggtggagcgattgcgggtggagctgcagcgggagcggcggcggggtgaggagcagcgggacagctttgagggggagcggctggcctggcaggcagagaaggagcaggtgatccgctaccagaagcagctgcagcacaactacatccagatgtaccggcgcaaccggcagctagagcaggagctgcagcagctcagcctggagctggaggcccgggagctcgctgacctgggcctggccgagcaggccccctgcatctgcctggaggagatcactgctactgagatctagggccctcagcaaccagctctgtagggagctctgccagaggggcagcagctgcagatccacttaggccccagggtccacggatggccccaaaggctgagggccccaaagccacttgtctcctaggatccaggcctctgggcttctgccaagaactcagggtggccctatgacttggaggagcaagatcagaccgctcaaaggtccccgtgttcactgttacccagaggctcttgttactacccacttcattccccaccgctgccagtgccactgccaaccctgttcacaggcgcttccagcccactccagccaggggagcagggaagaagaaggggctccctcctcttcacattccccccgaccccaaagccagagaaagccagatggcaccagctgctccggatgtgcctgcccacattgggggacagggccgggcctgggctcggttcccaggtttgagctctgcagcctctctcctggagtgagggggctgaagtcagaccaaaggaagaactcagaaatgtcttgtttatttgtgtttgtgaccaagcagcctctcccttcacccaggtttatggcctcgttttcacttgtatatttttcacactgtaaatttcttgtacaaacccaaagaaaaaattaaaaaaaatttttttgttta

SEQ ID NO: 39 - DNA, 2372 bp, Homo sapien
gcggccgccgccgcgccgtggccctttgtgctggaacaatgaccagctgccgctggccccggggccccggctggggttgagggtgaccaccgccgccgccgcgtcgagccgaaccgagcccccagacacgcagtcacagggcgtcggagggagggctcccgactgccgccgagcagcccctacgtgcgccccggcggattcgcgtgacgcgggtgcttgcgcgtgtccgcgccccggggcggagacgcccctcggaccctcccctgcgcggtgccgcccactcgcaccgggcgggggctggccagggccgggggcgccgcggaggcggaggcggggctgggccgggcagctccgagtggcggcgcgcgggccagggccggggccggggccggggccggagccggagccggggccgggcggcgcgcctgtggagcgctgggggcggcctggggctgagcatggagcagcgcggcggaggtgaggggggccgggtctgggaggcggcctggggagcccccaacttmtgcgcggtggaatccagccggggggacggcgttccccagtcgcccccactttctggaaggggggctggactctggagaatgggtcaggggctcctggcttcccgccgcagaatgggaactcgtgatcgcagacttgaccccgcttgactggtccttggagtttgggtgggagggagactttccccaactcttcagatccgtctccggccctgaaccagctccagccctctgctctcctcagcccactaaaaggggggtgctcctgggccagagtgattgctcagggagtgctggggagaatgaggggttcccatctcccacagccacaaacgcatttctcaaaatggagcctccacttgcccctccttctctttcgggctccaagagcgggagccggcctggctgggcctggctttccagactcctggctctggctccctggatgtgtggctctcagggcccggctctgtggcactttggacttatgggccctcggctccgtggggttggggggccctggctcactgggtcccgctggctgtccccttgtcggcctgaccctcgggcctctccgagtctttgtctcttttgggtccctgtctttctctgagcctgtctccttccttcaattttcactttctccgtgctcgctgaagtggggaaatgcaacagaggtgccagcccccttggccccctaagaagtcccttccccactgttcactccacaccctggagtgggcccagagaggggaggggagggggttctctatctgctctgctgggggctggggtgtgtggggtggtctgagccccagccctacagaggggcctgtggtcactccctgctcctggcctacccctcccccagctccccgcagctcctgccccagcgtggacacgtggagcgattgcgggtggagctgcagcgggagcggcggcggggtgaggagcagcgggacagctttgagggggagcggctggcctggcaggcagagaaggagcaggtgatccgctaccagaagcagctgcagcacaactacatccagatgtaccggcgcaaccggcagctagagcaggagctgcagcagctcagcctggagctggaggcccgggagctcgctgacctgggcctggccgagcaggccccctgcatctgcctggaggagatcactgctactgagatctagggccctcagcaaccagctctgtagggagctctgccagaggggcagcagctgcagatccacttaggccccagggtccacggatggccccaaaggctgagggccccaaagccacttgtctcctaggatccaggcctctgggcttctgccaagaactcagggtggccctatgacttggaggagcaagatcagaccgctcaaaggtccccgtgttcactgttacccagaggctcttgttactacccacttcattccccaccgctgccagtgccactgccaaccctgttcacaggcgcttccagcccactccagccaggggagcagggaagaagaaggggctccctcctcttcacattccccccgaccccaaagccagagaaagccagatggcaccagctgctccggatgtgcctgcccacattgggggacagggccgggcctgggctcggttcccaggtttgagctctgcagcctctctcctggagtgagggggctgaagtcagaccaaaggaagaactcagaaatgtcttgtttatttgtgtttgtgaccaagcagcctctcccttcacccaggtttatggcctcgttttcacttgtatatttttcacactgtaaatttcttgtacaaacccaaagaaaaaattaaaaaaaatttttttgttta

SEQ ID NO: 40 - DNA, 5075 bp, Homo sapien
gcggccgccgccgcgccgtggccctttgtgctggaacaatgaccagctgccgctggccccggggccccggctggggttgagggtgaccaccgccgccgccgcgtcgagccgaaccgagcccccagacacgcagtcacagggcgtcggagggagggctcccgactgccgccgagcagcccctacgtgcgccccggcggattcgcgtgacgcgggtgcttgcgcgtgtccgcgccccggggcggagacgcccctcggaccctcccctgcgcggtgccgcccactcgcaccgggcgggggctggccagggccgggggcgccgcggaggcggaggcggggctgggccgggcagctccgagtggcggcgcgcgggccagggccggggccggggccggggccggagccggagccggggccgggcggcgcgcctgtggagcgctgggggcggcctggggctgagcatggagcagcgcggcggaggtgaggggggccgggtctgggaggcggcctggggagcccccaacttmtgcgcggtggaatccagccggggggacggcgttccccagtcgcccccactttctggaaggggggctggactctggagaatgggtcaggggctcctggcttcccgccgcagaatgggaactcgtgatcgcagacttgaccccgcttgactggtccttggagtttgggtgggagggagactttccccaactcttcagatccgtctccggccctgaaccagctccagccctctgctctcctcagcccactaaaaggggggtgctcctgggccagagtgattgctcagggagtgctggggagaatgaggggttcccatctcccacagccacaaacgcatttctcaaaatggagcctccacttgcccctccttctctttcgggctccaagagcgggagccggcctggctgggcctggctttccagactcctggctctggctccctggatgtgtggctctcagggcccggctctgtggcactttggacttatgggccctcggctccgtggggttggggggccctggctcactgggtcccgctggctgtccccttgtcggcctgaccctcgggcctctccgagtctttgtctcttttgggtccctgtctttctctgagcctgtctccttccttcaattttcactttctccgtgctcgctgaagtggggaaatgcaacagaggtgccagcccccttggccccctaagaagtcccttccccactgttcactccacaccctggagtgggcccagagaggggaggggagggggttctctatctgctctgctgggggctggggtgtgtggggtggtctgagccccagccctacagaggggcctgtggtcactccctgctcctggcctacccctcccccagctccccgcagctcctgccccagcgtggacacctcttcctggttcgcagtgtcttttgacttgggtgggaaggagggcggtggatttaatggagggcatgcgagaaagaaggggaacagatcaggcaaaggagttagataatgtcccacctctccccacacgccgaagagagaaggaaacaggctccccccaccaatgggccctcaagccacccaggctcccaccactctcatacctgcgtgcccacgttcacaggctccactgcaccactcaccttcctagtcacacacaaacacaggagctcacacataaactcatgaacttactgacaagtctgtccaggcaccgtctctcccacacaccacaaattcacttgttagatccacatttataactttcacaggctttctaatgacccctgatccacatactcttctaagatatacacatgtgaattcacacatgaactcatatgtatgtgaatgaactgatatatcaaacatgcatagactcacatgatgttttcacacacattttcatacacacgtgttcattttcatgctcctgtgcatgtagtcacacaacaaataactaaatgcacacactcctactcccagtgcaattctctgtccacttcttggccccgctctgcatgatgacttcagcagatgcctaagtcctggtcatcagcggcctcgggactgggactagggagggggttccgggtggaggcttgcagctgcttccaggaaggagcagagcctggggaggtggagccctcttgcctgggctctgtggaagtgaggttttggagcagcctccagaggtgaaggcagggcatctaccttcctcccctcagggttagtttggggaccttctgaagctgtagggtttcagagaggttggcagtggggcagagcctgtggaggctccttcaggccttcaggcctcaccgattgggtgtgcagaggctaggagttgtcatggaaactggtatgagcctgcatccacctctgggaggcaggagaccccaaaggacacctgtggactccctaagagccgcgggtttcttatttagccagatcgacagagaggcagtttagccgcctttctgtctgagagaaactgaggcccagcagagggaggcagggcactgcctggccttggctctttgttccctaattaccatctgaggtgctgattgcacccctgaggtacctctgcccaaactgccctgtaatgaggccacctggctgagaggaccagggacctgtgcttcaagctggtagagaaggcccctccctcacctgagtcctggcctctgtggaggatgcaggattgggcttgggcctgggtctttgctgccaggtggccctgcggtaatcatccaggcctcccatgcctctcagcatctctgctgagtgaattcactcctcagccctgttcagaccagcattgggcagtgtggtttggggcccagggggaattgagattcattccagcacttgaagggggagtcttggtggggatcagggcttgttactgatgtcaaggaggtgtttggtcaggatcagtgggtcaggaggggtctcaaggtggagggactctgacaccactgccctgcttacaggttgcctgcgaggccgctggccaggcctgagcctctgccaccatggccattgtgcagactctgccagtgccactggagcctgctcctgaagctgccactgccccacaagctccagtcatgggtagtgtgagcagccttatctcaggccggccctgtcccggggggccagctcctccccgccaccacggccctcctgggcccaccttcttccgccagcaggatggcctgctacggggtggctatgaggcacaggagccgctgtgcccagctgtgccccctaggaaggctgtccctgtcaccagcttcacctacatcaatgaggacttccggacagagtcaccccccagcccaagcagtgatgttgaggatgcccgagagcagcgggcacacaatgcccacctccgcggcccaccaccaaagctcatccctgtctctggaaagctggagaagaacatggagaagatcctgatccgcccaacagccttcaagccagtgctgcccaaacctcgaggggctccgtccctgcctagcttcatgggtcctcgggccaccgggctgtctgggagccagggcagcctgacgcagctgtttgggggccctgcctcctcctcctcctcttcctcctcctcttcagctgctgacaaacccctggcatttagtggctgggccagtggctgcccatcagggacgctatccgactctggccgaaactcactgtccagcctgcccacctacagcaccggaggtgccgagccaaccaccagctccccaggcgggcacctgccttcccatggctctgggcgaggggcactgcctgggccagcccgaggggtccctactgggccctcccactcagacagtggccggtcctcctccagcaagagcacaggctccctagggggccgtgtggctggggggcttttgggcagtggtactcgggcctcccctgacagcagctcctgtggggagcgctcaccaccacccccgcctccacctccttcggatgaggccctgctgcactgtgtcctggaaggaaagctccgagaccgggaggcagagcttcagcagctgcgggacagtctggacgagaatgaggctaccatgtgccaggcatacgaggagcggcagcggcactggcagcgagagcgtgaggccctgcgagaggactgtgcggcccaggcacagcgggcacagcgggcccaacagctgctgcagctgcaggtgttccagctgcagcaggagaagcggcaattgcaggacgacttcgcacagctgctgcaggagcgcgaacagctggagcggcgctgcgccaccttggagcgggagcggcggcggggtgaggagcagcgggacagctttgagggggagcgggatcactgctactgagatctagggccctcagcaaccagctctgtagggagctctgccagaggggcagcagctgcagatccacttaggccccagggtccacggatggccccaaaggctgagggccccaaagccacttgtctcctaggatccaggcctctgggcttctgccaagaactcagggtggccctatgacttggaggagcaagatcagaccgctcaaaggtccccgtgttcactgttacccagaggctcttgttactacccacttcattccccaccgctgccagtgccactgccaaccctgttcacaggcgcttccagcccactccagccaggggagcagggaagaagaaggggctccctcctcttcacattccccccgaccccaaagccagagaaagccagatggcaccagctgctccggatgtgcctgcccacattgggggacagggccgggcctgggctcggttcccaggtttgagctctgcagcctctctcctggagtgagggggctgaagtcagaccaaaggaagaactcagaaatgtcttgtttatttgtgtttgtgaccaagcagcctctcccttcacccaggtttatggcctcgttttcacttgtatatttttcacactgtaaatttcttgtacaaacccaaagaaaaaattaaaaaaaatttttttgttta

SEQ ID NO: 41 - DNA, 5062 bp, Homo sapien
  misc_feature (5062)..(5062): n=a, c, g or t
agcggattgatccggcggcgcgggattggccagtcccgggccaacacgggtggcgggagttttcagatgtgttggctgcggccccgacttcagcggttgggctaggctgtgctgactgtttgggtggcggaccccgggagtaaaacctgttgtcgatccctcagcttccagcttgcggcttgctgagtggccaccttctttccggtccccggagctgcggggaaagatggaacggcaccagccgcggctgcaccacccggcccaaggctcagccgctgggactccctacccttcctcagcctctctccgcggctgccgggaaagcaagatgccgcgcaggaagggcccccaacaccctccgccgcccagtggccccgaggagcctggggagaagcgccccaagtttcatttaaatattaggacactgacggatgatatgctggacaaatttgccagcataagaattccagggagcaagaaagagagacctccacttcccaacctgaagactgcatttgcaagcagtgattgctcagcagcacctttagagatgatggagaactttccaaagccactgtcagagaatgaactcttagaactttttgaaaaaatgatggaagatatgaatttaaatgaagataaaaaggcaccattgcgggaaaaggacttcagtatcaaaaaagaaatggtgatgcagtacattaatactgcttctaagacaggaagtcttaagagaagccgacagatctcacctcaggaattcattcatgagctgaaaatggggtctgcagatgagagacttgtcacatgcctggagtctctccgagtgtctttgaccagcaatcctgtgagttgggtggaaagctttggacatgaagggcttggattattattagacattttggaaaaactgattagtggaaaaatccaagaaaaagttgtaaagaaaaatcaacataaagtcatacagtgtctaaaagccctgatgaatacgcagtatggcttggaaagaattatgagtgaggagaggagcctttccttattggccaaagccgtggatcccagacaccccaatatgatgacagatgtggttaaacttctctctgcggtatgcattgtaggggaagaaagcatccttgaagaagttttagaagctttaacttcagctggtgaagaaaaaaaaattgacagatttttttgtattgtggaaggcctccggcacaattcagttcaactgcaagtagcttgtatgcagctcatcaatgccctggttacatctcctgatgatttggatttcaggcttcacatcagaaatgaatttatgcgttgtggattgaaagagatattgccaaatttaaaatgcattaagaatgatggcctggatatccaacttaaagtctttgatgagcataaagaagaagatttgtttgagttatcccatcgccttgaagatattagagctgaacttgatgaagcatatgatgtttacaacatggtgtggagcacagttaaagaaactagagcagagggatattttatttctattcttcagcatcttttgctgattcgaaatgattattttataaggcaacaatacttcaaattaattgatgagtgtgtatcccagattgtattgcatagagatggaatggatccagacttcacatatcgaaaaagactagatttagatttaacccagtttgtagacatttgcatagatcaagcaaaactagaagagtttgaagagaaagcatcagaactttacaagaaatttgaaaaagagtttaccgaccaccaagaaactcaggctgaattgcagaaaaaagaggcaaagattaatgagcttcaagcagagctacaagcttttaagtctcagtttggtgccttgccagctgattgtaatattcctttgcctccctctaaagaaggtggaactggccactcagcacttcctcctccgcctccactgccttctggtggaggggtgccgcctccacctcctcccccaccacctcctccacttccaggaatgcggatgccattcagtggtcctgtgcctccaccacctcccctgggattccttggaggacaaaattctcctcctctaccaatcctgccatttgggttgaaaccaaagaaagaatttaaacctgaaatcagcatgagaagattgaattggttaaagatcagacctcatgaaatgactgaaaactgtttctggataaaagtaaatgaaaataagtatgaaaacgtggatttgctttgtaaacttgagaatacattttgttgccaacaaaaagagagaagagaagaggaagatattgaagagaagaaatcgattaagaaaaaaattaaagaacttaagtttttagattctaaaattgcccagaacctttcaatcttcctgagctcttttcgggtgccatatgaggaaatcagaatgatgatattggaagtagatgaaacacggttggcagagtctatgattcagaacttaataaagcatcttcctgatcaagagcaattaaattcattgtctcagttcaagagtgaatatagcaacttatgtgaacctgagcagtttgtggttgtgatgagcaatgtgaagagactacggccacggctcagtgctattctctttaagcttcagtttgaagagcaggtgaacaacatcaaacctgacatcatggctgtcagtactgcctgcgaagagataaagaagagcaaaagctttagcaagttgctggaacttgtattgctaatgggaaactacatgaatgctggctcccggaatgctcaaaccttcggatttaaccttagctctctctgtaaactaaaggacacaaaatcagcagatcagaaaacaacgctacttcatttcctggtagaaatatgtgaagagaagtaccctgatatactgaattttgtggatgatttggaacctttagacaaagctagtaaagtctctgtagaaacgctggaaaagaatttgaggcagatgggaaggcagcttcaacagcttgagaaggaattggaaacctttccccctcctgaggacttgcatgacaagtttgtgacaaagatgtccagatttgttatcagtgcaaaagaacaatatgagacactttcgaagttacacgaaaacatggaaaagttataccagagtataataggatactatgccattgatgtgaagaaggtgtctgtggaagactttcttactgacctgaataacttcagaaccacattcatgcaagcaataaaggagaatatcaaaaaaagagaagcagaggaaaaagaaaaacgtgtcagaatagctaaagaattagcagagcgagaaagactcgaacgccaacaaaagaaaaagcgtttattagaaatgaagactgagggtgatgagacaggagtgatggataatctgctggaggccttgcagtccggggctgccttccgcgacagaagaaaaaggacaccgatgccaaaagatgttcggcagagtctcagtccaatgtctcagaggcctgttctgaaagtttgtaaccatgaaaatcagaaagtgcagttgacagaagggtcacgttcacactacaatatcaattgcaactcaacaaggactccagtcgccaaggagcttaattataatctagacactcatacgtctactgggaggatcaaggcagctgagaagaaggaagcgtgtaatgtagaaagcaacagaaaaaaggaaacggaacttcttggctctttttctaaaaatgaatcagttcccgaagttgaagccctgctggcaagattacgagctttataagttaaactggtttttaaaaaaaatgattaagccaaatataaagccatgctctaaactataacacttgaaaaaattgcttttatgtaagtgactttatatagttttaaattatgatatatattagaaaaataaagctaaatatatgaatgcaatgctttttctatgtactggaggttttggtttattcaagattgtaccgggctttaatccttttttttttttttttgtctcctggtattcctcagttctttatttggtggttaaattatacatattgctttagagagcaggtaggtggccatgtgttcagcagtgtgtccttaagaaaataccatctttctaagccactggaatttttactttactatttttaacattaatggatgtcaggtcatcaacctcaagtctttacatatccatggtatattccatatatattgtttatataggcccaagtttctccttaattgggatctatatactaccagcacaacatcaaaaacatgtaattgaatacatcagagctatatatgtaaggaaatgactggtgaccccattatcatcattgttgaattcatgttaagtagaccctctaggggaccataaggcaattgagcacataacgaaaaatgatgcaataagaatgtatgcactctctttgccaaatgcatgtgcttttgtgtaacgtggatgtaaacagaattgcagtgctgccgaaattcttgatcttggctaagagagtatttttccccttgtaattatgactctgagataaaattgccattttgaaatttccaaagtaacaactttttttattttatgaataaacttgggattgcaatttctctgatctgacaatcaataactttaacaaagatctaaataagtgtttcaaggaaagttttcctaagcaaatgtaatattacctcatttgggcatcattactctgttaattctatatcaaaggaaataaacttgctacttgcactaaatgaaaaaacacgaacaaaaggaagaaccagaaaaaaacagaaaaaacaagaaaatacgaaaaaaggaaacagaaagcaacaaagaaagaacaaagccggagaagaagaaagacaaaaaaaaaagaggcccagatcataacccgagagaaaacgagactcgagattagagaaagaagtaaataaaccgcggggtaatgagagaaagaagcagaagcacgaggagagaaacaccaagagagaatagaaaacatcaacaataaan

SEQ ID NO: 42 - DNA, 2672 bp, Homo sapien
acgtccaccccgaatccctgcttaaaggccttgctttcttgtctaacgccgcaaccagtcctctgagttgccaacgtctttcttcttgtctcgacgccccgtcgtccggccacagcgattctctgcttagcaggatcggtccacagcgggacgtgagtccctttcctcctcgcggcttaccgcctctctccgcctagtgccaggtgctaataaagttgttgtttcaaatgcggccaggaacatcgcgagcggggaccaatcagagagtagctttgcctctataacggcgcgagagtgagacgtcatcggtgagcgactaacgctagaaacagtggtgcgcggagaggagaggcctcgggatgtctctggcagatgagctcttagctgatctcgaagaggcagcagaagaggaggaaggaggaagctatggggaggaagaagaggagccagcgatcgaggatgtgcaggaggagacacagctggatctttccggggattcagtcaagaccatcgccaagctatgggatagtaagatgtttgctgagattatgatgaagattgaggagtatatcagcaagcaagccaaagcttcagaagtgatgggaccagtggaggccgcgcctgaataccgcgtcatcgtggatgccaacaacctgaccgtggagatcgaaaacgagctgaacatcatccataagttcatccgggataagtactcaaagagattccctgaactggagtccttggtccccaatgcactggattacatccgcacggtcaaggagctgggcaacagcctggacaagtgcaagaacaatgagaacctgcagcagatcctcaccaatgccaccatcatggtcgtcagcgtcaccgcctccaccacccaggggcagcagctgtcggaggaggagctggagcggctggaggaggcctgcgacatggcgctggagctgaacgcctccaagcaccgcatctacgagtatgtggagtcccggatgtccttcatcgcacccaacctgtccatcattatcggggcatccacggccgccaagatcatgggtgtggccggcggcctgaccaacctctccaagatgcccgcctgcaacatcatgctgctcggggcccagcgcaagacgctgtcgggcttctcgtctacctcagtgctgccccacaccggctacatctaccacagtgacatcgtgcagtccctgccaccggatctgcggcggaaagcggcccggctggtggccgccaagtgcacactggcagcccgtgtggacagtttccacgagagcacagaagggaaggtgggctacgaactgaaggatgagatcgagcgcaaattcgacaagtggcaggagccgccgcctgtgaagcaggtgaagccgctgcctgcgcccctggatggacagcggaagaagcgaggcggccgcaggtgaggggccctgggggtccggtaggcatgggggtcatggaggggagaagccggcgtcctcctcccagccgactccctggcgccgcccacccacccgtccccgtaccgcaagatgaaggagcggctggggctgacggagatccggaagcaggccaaccgtatgagcttcggagaggtcagactcccagagcgccctcctcaaccccacagccagccagccgccaccgccctctgcctcctgccaccgcccctcctctcgtcctgtggccctggctcatgtctagggcgctgccccagcctccccccccgccggcctctattctcgtttccatccattcagccccaaagcgaccctcgcggcccttggagcctgtgtctccgctgcttagagcccccgcggcttcccatcgccccgggctccttggccggttcctccctgcccagaggctccttagtgccctgctgcacggccgccccgtccctgggcccggccagtctcctctgttatcccagcgtcatccccttggtcctgcaggaccgaaactcagaggccacctcatcctattaaacctgttctggttcctgacatcccccgacccacacgaatcgaggaggacgcctaccaggaggacctgggattcagcctgggccacctgggcaagtcgggcagtgggcgtgtgcggcagacacaggtaaacgaggccaccaaggccaggatctccaagacgctgcagcggaccctgcagaagcagagcgtcgtatatggcgggaagtccaccatccgcgaccgctcctcgggcacggcctccagcgtggccttcaccccactccagggcctggagattgtgaacccacaggcggcagagaagaaggtggctgaggccaaccagaagtatttctccagcatggctgagttcctcaaggtcaagggcgagaagagtggccttatgtccacctgaatgactgcgtgtgtccaaggtggcttcccactgaagggacacagaggtccagtccttctgaagggctaggatcgggttctggcagggagaacctgccctgccactggccccattgctgggactgcccagggaggaggccttggaagagtccggcctggcctcccccaggaccgagatcaccgcccagtatgggctagagcaggtcttcatcatgccttgtcttttttaactgagaaaggagattttttgaaaagagtacaattaaaaggacattgtcaaga

SEQ ID NO: 43 - DNA, 2436 bp, Homo sapien
cgccgcccctatgctgggaccaggctcccagtgggcagccctggsctcttccttaacgctgcagctgcgactccacgtactccctcagtgactggagcgacggagaccgtcacgccctcagaggccccggtgctggcagctgagcccgaggctgacaagggcactgtgttggcactcactgaaaataacttcgatgacaccattgcagaaggaataaccttcatcaagttttatgctccatggtgtggtcattgtaagactctggctcctacttgggaggaactctctaaaaaggaattccctggtctggcgggggtcaagatcgccgaagtagactgcactgctgaacggaatatctgcagcaagtattcggtacgaggctaccccacgttattgcttttccgaggagggaagaaagtcagtgagcacagtggaggcagagaccttgactcgttacaccgctttgtcctgagccaagcgaaagacgaactttaggaacacagttggaggtcacctctcctgcccagctcccgcaccctgcgtttaggagttcagtcccacagaggccactgggttcccagtggtggctgttcagaaagcagaacatactaagcgtgaggtatcttctttgtgtgtgtgttttccaagccaacacactctacagattctttattaagttaagtttctctaagtaaatgtgtaactcatggtcactgtgtaaacattttcagtggcgatatatcccctttgaccttctcttgatgaaatttacatggtttcctttgagactaaaatagcgttgagggaaatgaaattgctggactatttgtggctcctgagttgagtgattttggtgaaagaaagcacatccaaagcatagtttacctgcccacgagttctggaaaggtggccttgtggcagtattgacgttcctctgatcttaaggtcacagttgactcaatactgtgttggtccgtagcatggagcagattgaaatgcaaaaacccacacctctggaagataccttcacggccgctgctggagcttctgttgctgtgaatacttctctcagtgtgagaggttagccgtgatgaaagcagcgttacttctgaccgtgcctgagtaagagaatgctgatgccataactttatgtgtcgatacttgtcaaatcagttactgttcaggggatccttctgtttctcacggggtgaaacatgtctttagttcctcatgttaacacgaagccagagcccacatgaactgttggatgtcttccttagaaagggtaggcatggaaaattccacgaggctcattctcagtatctcattaactcattgaaagattccagttgtatttgtcacctggggtgacaagaccagacaggctttcccaggcctgggtatccagggaggctctgcagccctgctgaagggccctaactagagttctagagtttctgattctgtttctcagtagtccttttagaggcttgctatacttggtctgcttcaaggaggtcgaccttctaatgtatgaagaatgggatgcatttgatctcaagaccaaagacagatgtcagtgggctgctctggccctggtgtgcacggctgtggcagctgttgatgccagtgtcctctaactcatgctgtccttgtgattaaacacctctatctcccttgggaataagcacatacaggcttaagctctaagatagataggtgtttgtccttttaccatcgagctacttcccataataaccactttgcatccaacactcttcacccacctcccatacgcaaggggatgtggatacttggcccaaagtaactggtggtaggaatcttagaaacaagaccacttatactgtctgtctgaggcagaagataacagcagcatctcgaccagcctctgccttaaaggaaatctttattaatcacgtatggttcacagataattctttttttaaaaaaacccaacctcctagagaagcacaactgtcaagagtcttgtacacacaacttcagctttgcatcacgagtcttgtattccaagaaaatcaaagtggtacaatttgtttgtttacactatgatactttctaaataaactctttttttttaaaaaaaaaaaaaaaaaaaaaaaaaacgacgaaaaaagaaaaaagggcggtccgaatccccgggccagtacgtcccgtgtgtaaaggggccaaaaggacgaattatagacaggcaggggcgcgttaacacggttgtgcggcaaaacgttatgggaatttggaagggaccctcttggtgggtgacatattgacacatacctaggaattagcttaggataataaaatttagggtttaatggttaacaagggattttctgggttaaaatttgctgtcgaaatttttttgaaaatttttttctggacttttaaataggggtt

SEQ ID NO: 44 - DNA, 1560 bp, Homo sapien
acggaccaacacagtattgagtcaactgtgaccttaagatcagrggaacgtcaatactgccacaaggccacctttccagaactcgtgggcaggtawactatgctttggagcagattgaaatgcaaaaacccacacctctggaagataccttcacggccgctgctggagcttctgttgctgtgaatacttctctcagtgtgagaggttagccgtgatgaaagcagcgttacttctgaccgtgcctgagtaagagaatgctgatgccataactttatgtgtcgatacttgtcaaatcagttactgttcaggggatccttctgtttctcacggggtgaaacatgtctttagttcctcatgttaacacgaagccagagcccacatgaactgttggatgtcttccttagaaagggtaggcatggaaaattccacgaggctcattctcagtatctcattaactcattgaaagattccagttgtatttgtcacctggggtgacaagaccagacaggctttcccaggcctgggtatccagggaggctctgcagccctgctgaagggccctaactagagttctagagtttctgattctgtttctcagtagtccttttagaggcttgctatacttggtctgcttcaaggaggtcgaccttctaatgtatgaagaatgggatgcatttgatctcaagaccaaagacagatgtcagtgggctgctctggccctggtgtgcacggctgtggcagctgttgatgccagtgtcctctaactcatgctgtccttgtgattaaacacctctatctcccttgggaataagcacatacaggcttaagctctaagatagataggtgtttgtccttttaccatcgagctacttcccataataaccactttgcatccaacactcttcacccacctcccatacgcaaggggatgtggatacttggcccaaagtaactggtggtaggaatcttagaaacaagaccacttatactgtctgtctgaggcagaagataacagcagcatctcgaccagcctctgccttaaaggaaatctttattaatcacgtatggttcacagataattctttttttaaaaaaacccaacctcctagagaagcacaactgtcaagagtcttgtacacacaacttcagctttgcatcacgagtcttgtattccaagaaaatcaaagtggtacaatttgtttgtttacactatgatactttctaaataaactctttttttttaaaaaaaaaaaaaaaaaaaaaaaaaacgacgaaaaaagaaaaaagggcggtccgaatccccgggccagtacgtcccgtgtgtaaaggggccaaaaggacgaattatagacaggcaggggcgcgttaacacggttgtgcggcaaaacgttatgggaatttggaagggaccctcttggtgggtgacatattgacacatacctaggaattagcttaggataataaaatttagggtttaatggttaacaagggattttctgggttaaaatttgctgtcgaaatttttttgaaaatttttttctggacttttaaataggggtt

SEQ ID NO: 45 - DNA, 919 bp, Homo sapien
tgatggtgactctagagtatcccstacgagagaagagacgtcaagaccaaagacagatgtcagtgggctgctctggccctggtgtgcacggctgtggcagctgttgatgccagtgtcctctaactcatgctgtccttgtgattaaacacctctatctcccttgggaataagcacatacaggcttaagctctaagatagataggtgtttgtccttttaccatcgagctacttcccataataaccactttgcatccaacactcttcacccacctcccatacgcaaggggatgtggatacttggcccaaagtaactggtggtaggaatcttagaaacaagaccacttatactgtctgtctgaggcagaagataacagcagcatctcgaccagcctctgccttaaaggaaatctttattaatcacgtatggttcacagataattctttttttaaaaaaacccaacctcctagagaagcacaactgtcaagagtcttgtacacacaacttcagctttgcatcacgagtcttgtattccaagaaaatcaaagtggtacaatttgtttgtttacactatgatactttctaaataaactctttttttttaaaaaaaaaaaaaaaaaaaaaaaaaacgacgaaaaaagaaaaaagggcggtccgaatccccgggccagtacgtcccgtgtgtaaaggggccaaaaggacgaattatagacaggcaggggcgcgttaacacggttgtgcggcaaaacgttatgggaatttggaagggaccctcttggtgggtgacatattgacacatacctaggaattagcttaggataataaaatttagggtttaatggttaacaagggattttctgggttaaaatttgctgtcgaaatttttttgaaaatttttttctggacttttaaataggggtt

SEQ ID NO: 46 - DNA, 618 bp, Homo sapien
ccaggcgactctagaggatccgggctccacttggttgggttgcagccggagccgcccagctcaccgagagcctagttccggccagggtcgccccggcaaccacgagcccagccaatcagcgccccggactgcaccagagccatggtcggcagaagagcactgatcgtactggctcactcagagaggacgtccttcaactatgccatgaaggaggctgctgcagcggctttgaagaagaaaggatgggaggtggtggagtcggacctctatgccatgaacttcaatcccatcatttccagaaaggacatcacaggtaaactgaaggaccctgcgaactttcagtatcctgccgagtctgttctggcttataaagaaggccatctgagcccagatattgtggctgaacaaaagaagctggaagccgcagaccttgtgatattccaggtatggggggacatcggaaggggtgtcagggacatttgcgtgcttattgtcctagacatgtacctaattagctatgagatcttaaacagttacccactttactgcattctctgcaaataagggtgattactttaaaggtgcagtattacatggatttcacagatattgggaatc

SEQ ID NO: 47 - DNA, 932 bp, Homo sapien
ttcgagtcggtacccgcaaggtgaatatgagacctgcaatagcgataatctgaaccatgcggttttggcagtgggatatggaatccagaagggaaacaagcactggataattaaaaacagctggggagaaaactggggaaacaaaggatatatcctcatggctcgaaataagaacaacgcctgtggcattgccaacctggccagcttccccaagatgtgactccagccagccaaatccatcctgctcttccatttcttccacgatggtgcagtgtaacgatgcactttggaagggagttggtgtgctatttttgaagcagatgtggtgatactgagattgtctgttcagtttccccatttgtttgtgcttcaaatgatccttcctactttgcttctctccacccatgacctttttcactgtggccatcaggactttccctgacagctgtgtactcttaggctaagagatgtgactacagcctgcccctgactgtgttgtcccagggctgatgctgtacaggtacaggctggagattttcacataggttagattctcattcacgggactagttagctttaagcaccctagaggactagggtaatctgacttctcacttcctaagttcccttctatatcctcaaggtagaaatgtctatgttttctactccaattcataaatctattcataagtctttggtacaagtttacatgataaaaagaaatgtgatttgtcttcccttctttgcacttttgaaataaagtatttatctcctgtctacagtttaataaatagcatctagtacacattcattttgtgttggatactgtgttaggtgctggaggaaaaaagatgaatagaacatcttctatgtacttgatgcgctcacagtctggttgtagagactgtcacataaacatttcatcccaattc

SEQ ID NO: 48 - DNA, 2994 bp, Homo sapien
ttcgtctcgctttgttctggttcttcctcgtgtcggtcgttattgttcttcttccgcttcgttctcattcgttggtcctttcccttgctctcttcctccttttcctcctccctcttcgtggttctcttccggcgctgtggtcttgttcgtttctctcggtctgtcctggcttccgtcttgttggctcttctccttctgtcttcttgcgtccggtttcctgttgcttgtctgtctttctcgcttctgctcgtcatctgtttctccttgttcttgctttttctctctccggtctcgccttctttccttgtctcctcctccccttttcttctctttgcgtgtgcttgtctcgctcgctctgtgttcttctgtctctgcttttgtcgtgtccgcttgtctcttgtcttcttcggcttgctttttctcttctctcctctccgttcgctgctgttttctgttctccgtgcctctgtcccttttgtcttcttcgtcttcttcgcttccttccgttccctccgctcctcttcctccgttcctctcctctcgtcgttcctcccgctctcccctttcgctgctgctctggcttccctcgctggccgtcctccctcttcgcctccctctccttccctctgtcgtttctcgttgttgttcttgtgtgttgttgtgtgtgctcgtgttgttctggttcttggttggtggttgtgtggtgtgtgcgctgtgtgtgttgtttgttgtgtttgtgcgctcgtggtgtactgctgagaagtcacaccaccagcgtacgtcgtttaaccggctatcgtgggcgcatcccccgagggtctccgagccgggcggtccggcggctgttcccgccttcttttttttgctccttgggccctgtccaaacggtcccgtacttggccctcgagggaactttggcgccccctttttttttttgcatgtccaccttcgcttttattgagtagttagtgttctcaagctggctcacacccatgcggtcagctggggcctagggtggctctttgcaaagctgaggggcaagctaaggaagccaggcaggtcaggggccctttcggccttctcaagcctccacctgagttctcgtcaatgccagtctccctggtatgattggggacattatcagagaaacatctaatagcgcacatctgggcacccacactctgcttcagttgcatccatcctcccaccccaaattcaactcctgacccaatacaaaagacttttttaaccaggatttcttcttgcaggaaagctgacttggaaacacggggaggtggcagggaggggcaaaaaggactctggcaagcagatccacttgtctgggtccctgcagtgaagaacccaagatccaggtacctcagcctggaagaaaccgtgcactgcaggtcttcccttctatcaaaactaaaagcaaggaacagaagtcaattgaaaccccaggtcatcctacccaccttctggcagtctctggataatgatctaaggaaataagcttacatttataattagaggataatttggagaatttatactatttacacggaccaccctgcaaagatcagggaaggtaagagactgctgggcagagaatggaaacaggctggggggttcctaatctcttttcaccattgcctttgttgttcccacccttcagctcctggcagggacagcagaggaatcagatactcttggggaacacaaggtcccagcagtggctagggtgtgactgctacttttgcataatcaggcagcagggagctatgaggagcagaacagtccctgcctgctgtcctcactcagaggcttggggtgcactgagccttggagtgcccgggatggtggacagcttgagcacaggggcaagggcagggctctactgtagctcaggaataaactgggaccagttgatgttgtcagggcccagtgggtcctcgtccaggccaggaaagctgatgtccagcaggatcttgctgaggctgtcattcattgtgtccaggaccaggccttctgtcagagaacgattggctgcaaggccagaaacctgtggctccggggagcctggcttggggacgtctatatctgagggagaagagttgccaaaggggacggagatgaggtctaagggttctgaactgaggagcctttgcggtgattcaagggggggagcactttgcaagggagtggtgctgagatccatcagccccagggggtcaggcaaggggtcagaggcaccctgggaggtttgtactgggctgaaatccagtccccctactttggctgggggcgtgagcctccaggattcaggggttctggggaggacagatttgctcggggtggaggagatgggcagcgtttccttaatgggtgtcttaaaaggtcctcccacttcctgggagtagctgagctgggaggcagggtcagaggagtctgctgggaacgggagctctgcggcccagcgggaagtactgggcccctctgagaagagcagctccggctcatccacacagggaggcagtagatgctgtttcctccgagaccggctcctctccctcctctccctgtgttgaatcacaagcatttccgagacacaccgggttggggacctaagcccactgtaggacttcttgggtcttggggtgggagattgggacgaatcctcccaggagtgagatgattcctctttgaaagatggggccggggagggccactcttccaagggagggctctccactttgatgggtctcgctaagtgtggcatttcctccccaggctggatttcttcctccttgatagtctgaactggaagcaaaggagaaaacccttctccaaacaggagtttctcctctttccctggtcctgcagaagaaagaggagctatcccctcctcagctagcagcaccttgggggcaatgcggactcgcttgctatggcgggcaagctctgagctcatgagggaagccgccaggggcaatg

SEQ ID NO: 49 - DNA, 2053 bp, Homo sapien
ttcgtctcgctttgttctggttcttcctcgtgtcggtcgttattgttcttcttccgcttcgttctcattcgttggtcctttcccttgctctcttcctccttttcctcctccctcttcgtggttctcttccggcgctgtggtcttgttcgtttctctcggtctgtcctggcttccgtcttgttggctcttctccttctgtcttcttgcgtccggtttcctgttgcttgtctgtctttctcgcttctgctcgtcatctgtttctccttgttcttgctttttctctctccggtctcgccttctttccttgtctcctcctccccttttcttctctttgcgtgtgcttgtctcgctcgctctgtgttcttctgtctctgcttttgtcgtgtccgcttgtctcttgtcttcttcggcttgctttttctcttctctcctctccgttcgctgctgttttctgttctccgtgcctctgtcccttttgtcttcttcgtcttcttcgcttccttccgttccctccgctcctcttcctccgttcctctcctctcgtcgttcctcccgctctcccctttcgctgctgctctggcttccctcgctggccgtcctccctcttcgcctccctctccttccctctgtcgtttctcgttgttgttcttgtgtgttgttgtgtgtgctcgtgttgttctggttcttggttggtggttgtgtggtgtgtgcgctgtgtgtgttgtttgttgtgtttgtgcgctcgtggtgtactgctgagaagtcacaccaccagcgtacgtcgtttaaccggctatcgtgggcgcatcccccgagggtctccgagccgggcggtccggcggctgttcccgccttcttttttttgctccttgggccctgtccaaacggtcccgtacttggccctcgagggaactttggcgccccctttttttttttgcatgtccaccttcgcttttattgagtagttagtgttctcaagctggctcacacccatgcggtcagctggggcctagggtggctctttgcaaagctgaggggcaagctaaggaagccaggcaggtcaggggccctttcggccttctcaagcctccacctgagttctcgtcaatgccagtctccctggtatgattggggacattatcagagaaacatctaatagcgcacatctgggcacccacactctgcttcagttgcatccatcctcccaccccaaattcaactcctgacccaatacaaaagacttttttaaccaggatttcttcttgcaggaaagctgacttggaaacacggggaggtggcagggaggggcaaaaaggactctggcaagcagatccacttgtctgggtccctgcagtgaagaacccaagatccaggtacctcagcctggaagaaaccgtgcactgcaggtcttcccttctatcaaaactaaaagcaaggaacagaagtcaattgaaaccccaggtcatcctacccaccttctggcagtctctggataatgatctaaggaaataagcttacatttataattagaggataatttggagaatttatactatttacacggaccaccctgcaaagatcagggaaggtaagagactgctgggcagagaatggaaacaggctggggggttcctaatctcttttcaccattgcctttgttgttcccacccttcagctcctggcagggacagcagaggaatcagatactcttggggaacacaaggtcccagcagtggctagggtgtgactgctacttttgcataatcaggcagcagggagctatgaggagcagaacagtccctgcctgctgtcctcactcagaggcttggggtgcactgagccttggagtgcccgggatggtggacagcttgagcacaggggcaagggcagggctctactgtagctcaggaataaactgggaccagttgatgttgtcagggcccagtgggtcctcgtccaggccaggaaagctgatgtccagcaggatcttgctgaggctgtcattcattgtgtccaggaccaggccttctcaaccccagcctcgywcctagcg

SEQ ID NO: 50 - DNA, 2999 bp, Homo sapien
agaagaggacaggaaagaaacttcagtctgagggttgaggacacgtcccggagcagaggaggaccaagctcccaagccccctgtcaccttgacacgcagacggttccccaggactgcgaagaggggggcaaccagcgccccgccccgccccgctgcgccgcccgccattggccggtccgaaagacgcggggcgttgtcggtttgaatgagagcgcctggagccggggcgcaggcgcagaggagggcggtgttgagaccggcggagcggcgggacccctaggtggcggagggacgctccgggaaagcgaggggcgctacgagctctggcccacgtgacctgccgggggcgggagcagggggcgcgccggcctcctgcggtgcccctgccttggggaggggccgtgaccacccgtctgtcgcccgaggcggccgccgctgcaccttcaccgcgtacccgggacccgcccgcccgcgggagcttataatatgactcgatggaggaaaatttgataagcatgagagaagaccattcttttcatgttcgttacagaatggaagcttcttgcctagagctggccttggaaggggaacgtctatgtaaatcaggagactgccgcgctggcgtgtcattctttgaagctgcagttcaagttggaactgaagacctaaaaacacttagcgctatttacagccagttgggcaatgcttatttctatttgcatgattatgccaaagcattagaatatcaccatcatgatttaacccttgcaaggactattggagaccagctgggggaagcgaaagctagtggtaatctgggaaacaccttaaaagttcttgggaattttgacgaagccatagtttgttgtcagcgacacctagatatttccagagagcttaatgacaaggtgggagaagcaagagcactttacaatcttgggaatgtgtatcatgccaaagggaaaagttttggttgccctggtccccaggatgtaggagaatttccagaagaagtgagagatgctctgcaggcagccgtggatttttatgaggaaaacctatcattagtgactgctttgggtgaccgagcggcacaaggacgtgcctttggaaatcttggaaacacacattacctccttggcaacttcagggatgcagttatagctcatgagcagcgtctccttattgcaaaagaatttggagataaagcagctgaaagaagagcatatagcaaccttggaaatgcatatatatttcttggtgaatttgaaactgcctcggaatactacaagaagacactactgttggcccgacagcttaaagaccgagctgtagaagcacagtcttgttacagtcttggaaatacatatactttacttcaagactatgaaaaggccattgattatcatctgaagcacttagcaattgctcaagagctgaatgatagaattggtgaaggaagagcatgttggagcttaggaaatgcatacacagcactaggaaatcatgatcaagcaatgcattttgctgaaaagcacttggaaatttcaagagaggttggggataaaagtggtgaactaacagcacgacttaatctctcagaccttcaaatggttcttggtctgagctacagcacaaataactccataatgtctgaaaatactgaaattgatagcagtttgaatggtgtacgccccaagttgggacgccggcatagtatggaaaatatggaacttatgaagttaacaccagaaaaggtacagaactggaacagtgaaattcttgctaagcaaaaacctcttattgccaaaccttctgcaaagctactctttgtcaacagactgaaggggaaaaaatacaaaacgaattcctccactaaagttctccaagatgccagtaattctattgaccaccgaattccaaattctcagaggaaaatcagtgcagatactattggagatgaagggttctttgacttattaagccgatttcaaagcaataggatggatgatcagagatgttgcttacaagaaaagaactgccatacagcttcaacaacaacttcttccactccccctaaaatgatgctaaaaacatcatctgttcctgtggtatcccccaacacggatgagtttttagatcttcttgccagctcacagagtcgccgtctggatgaccagagggctagtttcagtaatttgccagggcttcgtctaacacaaaacagccagtcggtacttagccacctgatgactaatgacaacaaagaggctgatgaagatttctttgacatccttgtaaaatgtcaaggatccagattagatgatcaaagatgtgctccaccacctgctaccacaaagggtccgacagtaccagatgaagactttttcagccttattttacggtcccagggaaagagaatggatgaacagagagttcttttacaaagagatcaaaacagagacactgactttgggctaaaggactttttgcaaaataatgctttgttggagtttaaaaattcagggaaaaaatcggcagaccattagttactatggatttattttttttcctttcaaacacggtaaggaaacaatctattacttttttccttaaaaggagaatttatagcactgtaatacagcttaaaatatttttagaatgatgtaaatagttaaccttcagtagtctattaaggcattaatacttctctggacatgcgcgtttgagggtggaggggtcctgtaaggtgcttcatcgtctgtgattactgcttgggatgtgttctttggcagcttgtgagattactttacctagtgtttataaagtaggaagttaagtgaatcatagattagaatttaatactcttatggaaataattttttaacatcttaattgacaatggcgtttttttatacataaccatggatgtagtgggaaacaatgttgtttggtaaaaataatgtacttgatcaatgtaaaaaagtatataaaatagt

SEQ ID NO: 51 - DNA, 3045 bp, Homo sapien
agaagaggacaggaaagaaacttcagtctgagggttgaggacacgtcccggagcagaggaggaccaagctcccaagccccctgtcaccttgacacgcagacggttccccaggactgcgaagaggggggcaaccagcgccccgccccgccccgctgcgccgcccgccattggccggtccgaaagacgcggggcgttgtcggtttgaatgagagcgcctggagccggggcgcaggcgcagaggagggcggtgttgagaccggcggagcggcgggacccctaggtggcggagggacgctccgggaaagcgaggggcgctacgagctctggcccacgtgacctgccgggggcgggagcagggggcgcgccggcctcctgcggtgcccctgccttggggaggggccgtgaccacccgtctgtcgcccgaggcggccgccgctgcaccttcaccgcgtacccgggacccgcccgcccgcgggagaacccacagatctggaggacctactataatttaatttaattctaagcttataatatgactcgatggaggaaaatttgataagcatgagagaagaccattcttttcatgttcgttacagaatggaagcttcttgcctagagctggccttggaaggggaacgtctatgtaaatcaggagactgccgcgctggcgtgtcattctttgaagctgcagttcaagttggaactgaagacctaaaaacacttagcgctatttacagccagttgggcaatgcttatttctatttgcatgattatgccaaagcattagaatatcaccatcatgatttaacccttgcaaggactattggagaccagctgggggaagcgaaagctagtggtaatctgggaaacaccttaaaagttcttgggaattttgacgaagccatagtttgttgtcagcgacacctagatatttccagagagcttaatgacaaggtgggagaagcaagagcactttacaatcttgggaatgtgtatcatgccaaagggaaaagttttggttgccctggtccccaggatgtaggagaatttccagaagaagtgagagatgctctgcaggcagccgtggatttttatgaggaaaacctatcattagtgactgctttgggtgaccgagcggcacaaggacgtgcctttggaaatcttggaaacacacattacctccttggcaacttcagggatgcagttatagctcatgagcagcgtctccttattgcaaaagaatttggagataaagcagctgaaagaagagcatatagcaaccttggaaatgcatatatatttcttggtgaatttgaaactgcctcggaatactacaagaagacactactgttggcccgacagcttaaagaccgagctgtagaagcacagtcttgttacagtcttggaaatacatatactttacttcaagactatgaaaaggccattgattatcatctgaagcacttagcaattgctcaagagctgaatgatagaattggtgaaggaagagcatgttggagcttaggaaatgcatacacagcactaggaaatcatgatcaagcaatgcattttgctgaaaagcacttggaaatttcaagagaggttggggataaaagtggtgaactaacagcacgacttaatctctcagaccttcaaatggttcttggtctgagctacagcacaaataactccataatgtctgaaaatactgaaattgatagcagtttgaatggtgtacgccccaagttgggacgccggcatagtatggaaaatatggaacttatgaagttaacaccagaaaaggtacagaactggaacagtgaaattcttgctaagcaaaaacctcttattgccaaaccttctgcaaagctactctttgtcaacagactgaaggggaaaaaatacaaaacgaattcctccactaaagttctccaagatgccagtaattctattgaccaccgaattccaaattctcagaggaaaatcagtgcagatactattggagatgaagggttctttgacttattaagccgatttcaaagcaataggatggatgatcagagatgttgcttacaagaaaagaactgccatacagcttcaacaacaacttcttccactccccctaaaatgatgctaaaaacatcatctgttcctgtggtatcccccaacacggatgagtttttagatcttcttgccagctcacagagtcgccgtctggatgaccagagggctagtttcagtaatttgccagggcttcgtctaacacaaaacagccagtcggtacttagccacctgatgactaatgacaacaaagaggctgatgaagatttctttgacatccttgtaaaatgtcaaggatccagattagatgatcaaagatgtgctccaccacctgctaccacaaagggtccgacagtaccagatgaagactttttcagccttattttacggtcccagggaaagagaatggatgaacagagagttcttttacaaagagatcaaaacagagacactgactttgggctaaaggactttttgcaaaataatgctttgttggagtttaaaaattcagggaaaaaatcggcagaccattagttactatggatttattttttttcctttcaaacacggtaaggaaacaatctattacttttttccttaaaaggagaatttatagcactgtaatacagcttaaaatatttttagaatgatgtaaatagttaaccttcagtagtctattaaggcattaatacttctctggacatgcgcgtttgagggtggaggggtcctgtaaggtgcttcatcgtctgtgattactgcttgggatgtgttctttggcagcttgtgagattactttacctagtgtttataaagtaggaagttaagtgaatcatagattagaatttaatactcttatggaaataattttttaacatcttaattgacaatggcgtttttttatacataaccatggatgtagtgggaaacaatgttgtttggtaaaaataatgtacttgatcaatgtaaaaaagtatataaaatagt

SEQ ID NO: 52 - DNA, 1650 bp, Homo sapien
gaggccaaacatggggcggggcggcgcggccggggaagcgtgatgaaggcctacgagtgcggcgcggcctgaaggggcacgcgggggacctgcaaagctagtgaggggcggggcaggcggcgcggtgggggcgggccgagcccggaggccagatgagcggacacagccccacgcgcggggccatgcaggtggccatgaacggtaaggcccgcaaagaggcggtgcagactgcggctaaggaactcctcaagttcgtgaaccggagtccctctcctttccatgctgtggctgaatgccgcaaccgccttctccaggctggcttcagtgaactcaaggagactgagaaatggaatattaagcccgagagcaagtacttcatgaccaggaactcctccaccatcatagcttttgctgtagggggccagtacgttcctggcaatggcttcagcctcatcggggcccacacggacagcccctgcctccgggtgaaacgtcggtctcgccgcagccaggtgggcttccagcaagtcggtgtggagacctatggtggtgggatctggagcacctggtttgaccgtgacctgactctggctggacgcgtcattgtcaagtgccctacctcaggtcggctggagcagcagctggtgcacgtggagcggcccattcttcgcatcccacacctggccatccatctgcagcgaaatatcaacgagaactttgggcccaacacagagatgcatctagtccccattcttgccacagccatccaggaggagctggagaaggggactcctgagccagggcctctcaatgctgtggatgagcggcaccattcggtcctcatgtccctgctctgtgcccatctggggctgagccccaaggacatagtggagatggagctctgccttgcagacacccagcctgcggtcttgggtggtgcctatgatgagttcatctttgctcctcggctggacaatctgcacagctgcttctgtgccctgcaggccttgatagattcctgtgcaggccctggctccctggccacagagcctcacgtgcgcatggtcacactctatgacaacgaagaggtggggtctgagagtgcacagggagcacagtcactgctgacagagctggtgctgcggcggatctcagcctcgtgccagcacccgacagccttcgaggaagccatacccaagtccttcatgatcagcgcagacatggcccatgctgtgcatcccaactacctggacaagcatgaggagaaccaccggcctttattccacaagggccccgtgatcaaggtggcaaaggccccaacgttgtaggccctacgggctactacaacccttcggtgacgccataaaaactcttcaccaaagagcccttaaacccgcaaatctaccatcaacctttaaatcaacggccgacttagctttcaacatcgtcttattattgaaacccccctccatagcgaaccccgggtcaactacactaaggtctatttattgaggcccttacgagcgggcacccacccctgccaggggggaaccgctgccgtggccggcgacgccccacactcttcgcccattttgagtgccacacgcgccgcgcaaaagcacaaacaacaaggggcacggcgccgcatga

SEQ ID NO: 53 - DNA, 1204 bp, Homo sapien
ctctacaggatccccggtgtctcgccacamagattmcatcctcatgcatctaatcacagacgatgaagcaccttacaggacccctccaccctcaaacgcgcatgtccagagaagtattaatgccttaatagactactgaaggttaactatttacatcattctaaaaatattttaagctgtattacagtgctataaattctccttttaaggaaaaaagtaatagattgtttccttaccgtgtttgaaaggaaaaaaaataaatccatagtaactaatggtctgccgattttttccctgaatttttaaactccaacaaagcattattttgcaaaaagtcctttagcccaaagtcagtgtctctgttttgatctctttgtaaaagaactctctgttcatccattctctttccctgggaccgtaaaataaggctgaaaaagtcttcatctggtactgtcggaccctttgtggtagcaggtggtggagcacatctttgatcatctaatctggatccctagaagtttatgagagagattaaaagacatactgtgggaaagaaagcaccaagctatgttaaatctctcagtcacaacaagaaaacgcagttgtaaacttttatttggggcttctcagaaattaatctttgtttttatattgttctctttagttcccagcctgatttctgaaagaaataatctttaaacctgaaactgcataaaatttttcctttaaaatggcttatataggtatagctgcttcattggtttagtacgtgcattatgttaagtcatactgttttaattataattggtcacaaggataaaagacaaggtcaactgtatctaagtatgacagttcaaggttataatctaacaggcatcaactgtgtaacttaacaaatctttagaaatatgtacaaaccccatgaggaactaccttaaaaaaatcacgtcttaggctaggggacagcaaactgtaacccagtgccggcttctgtaaatgaagtcattttcattttcccatcaatacatatgtttatatactatctatatggctgcttccctactaaatggcagagttgggcagttgcaatagataccatatgggcggcaaagcctaaaatattttctatctggccttttacagaaaaagtttgcctgcctctgtcttaggctgttaaatctgttaagaaatagcccagaatgaa

SEQ ID NO: 54 - DNA, 265 bp, Homo sapien
cactagtacggcgcagtgtgcggaattcggtttcgagcggcgcccgggagtactgtgaataatgatgaaggagagtggagtggcccaccacctgaatgcagaggaaaatctctaacttccaaggtcccaccaacagttcagaaacctaccacagtaaatgttccaactacagaagtctcaccaacttctcagaaaaccaccacaaaaaccaccacaccaaatgctcaagcaacacggagtacctcggccgcgaccacgctaagcc

SEQ ID NO: 55 - DNA, 2326 bp, Homo sapien
ggcttagcgtggtcgcggccgaggtacagggtgggagatgggggaggggctgggggctgaagggagcaagaaagctgtagctgtgtggggctggcaggatgttgaagaccgcctctgctgctctcacatggggactgggcccagatcctgcttggtcacacccagcccagaagacgggtcctccagttccagtgactcactgcagttatggtgcccgcggcttctggtgttggggacctccgtgccgttggggggaggagaagcaggagctgtcgggaagatcagaagccagtcatggatgaccagcgcgaccttatctccaacaatgagcaactgcccatgctgggccggcgccctggggccccggagagcaagtgcagccgcggagccctgtacacaggcttttccatcctggtgactctgctcctcgctggccaggccaccaccgcctacttcctgtaccagcagcagggccggctggacaaactgacagtcacctcccagaacctgcagctggagaacctgcgcatgaagcttcccaagcctcccaagcctgtgagcaagatgcgcatggccaccccgctgctgatgcaggcgctgcccatgggagccctgccccaggggcccatgcagaatgccaccaagtatggcaacatgacagaggaccatgtgatgcacctgctccagaatgctgaccccctgaaggtgtacccgccactgaaggggagcttcccggagaacctgagacaccttaagaacaccatggagaccatagactggaaggtctttgagagctggatgcaccattggctcctgtttgaaatgagcaggcactccttggagcaaaagcccactgacgctccaccgaaagtactgaccaagtgccaggaagaggtcagccacatccctgctgtccacccgggttcattcaggcccaagtgcgacgagaacggcaactatctgccactccagtgctatgggagcatcggctactgctggtgtgtcttccccaacggcacggaggtccccaacaccagaagccgcgggcaccataactgcagtggtaagcagtggcactgtgccagtgtcagaggaccaggaaggactaggaaggttgaggggcaagaggtcccctctgaagcacatgggaccaggacacccaggatggcagctcctgggggcagtgacgtagtcatgcgtccagccctttatccatccacccacctgtgcattcctatttgtccatttatcatctctcctcttacatgcactcatatttgttcacttatccgtcagtcctttcatctgtgaatttcatccatccacgcgccatcctctagcatccaggagtcctacagacccacccatctcatttcatcacccccttctcactcgagcccccattacacctctttgttgctgcttgcagctgtccttccctgggtacctgctttcccaggcactaagcctgtggctaggtgggaagcactgccctcaggcatcttgggtcaggtaggctgcacttcaagtgacaaacggacttgctgctcctttgcagagtcactggaactggaggacccgtcttctgggctgggtgtgaccaagcaggatctgggcccagtccccatgtgagagcagcagaggcggtcttcaacatcctgccagccccacacagctacagctttcttgctcccttcagcccccagcccctcccccatctcccaccctgtacctcatcccatgagaccctggtgcctggctctttcgtcacccttggacaagacaaaccaagtcggaacagcagataacaatgcagcaaggccctgctgcccaatctccatctgtcaacaggggcgtgaggtcccaggaagtggccaaaagctagacagatccccgttcctgacatcacagcagcctccaacacaaggctccaagacctaggctcatggacgagatgggaaggcacagggagaagggataaccctacacccagaccccaggctggacatgctgactgtcctctcccctccagcctttggccttggcttttctagcctatttacctgcaggctgagccactctcttccctttccccagcatcactccccaaggaagagccaatgttttccacccataatcctttctgccgacccctagttccctctgctcagccaagcttgttatcagctttcagggccatggttcacattagaataaaaggtagtaatagaaaaaaaaaaaaaacccgggccttatggcgggggggaaaggggacaggaagggcatggctagggttcggccggtcttgacaggggattgcgggcca

SEQ ID NO: 56 - DNA, 1001 bp, Homo sapien
attctgcatgggccctggggcagggctsscatgggcagcgctgcatcagaatgctgaccccctgaaggtgtacccgccactgaaggggagcttcccggagaacctgagacaccttaagaacaccatggagaccatagactggaaggtctttgagagctggatgcaccattggctcctgtttgaaatgagcaggcactccttggagcaaaagcccactgacgctccaccgaaagagtcactggaactggaggacccgtcttctgggctgggtgtgaccaagcaggatctgggcccagtccccatgtgagagcagcagaggcggtcttcaacatcctgccagccccacacagctacagctttcttgctcccttcagcccccagcccctcccccatctcccaccctgtacctcatcccatgagaccctggtgcctggctctttcgtcacccttggacaagacaaaccaagtcggaacagcagataacaatgcagcaaggccctgctgcccaatctccatctgtcaacaggggcgtgaggtcccaggaagtggccaaaagctagacagatccccgttcctgacatcacagcagcctccaacacaaggctccaagacctaggctcatggacgagatgggaaggcacagggagaagggataaccctacacccagaccccaggctggacatgctgactgtcctctcccctccagcctttggccttggcttttctagcctatttacctgcaggctgagccactctcttccctttccccagcatcactccccaaggaagagccaatgttttccacccataatcctttctgccgacccctagttccctctgctcagccaagcttgttatcagctttcagggccatggttcacattagaataaaaggtagtaatagaaaaaaaaaaaaaacccgggccttatggcgggggggaaaggggacaggaagggcatggctagggttcggccggtcttgacaggggattgcgggcca

SEQ ID NO: 57 - DNA, 1211 bp, Homo sapien
caccagaagtgaggacggctgcctgggccctgccgtgtgctgctgggggggctggctccatggagggggtcctctgccctgctggctggtggctgaggccccaggcctgtgcccagggccgctggcagcacagtgaggccacgtccacagcagagttggccgtggagatagtgtacgtggtgccctccgtagctgagagcctcccagccccacactggctgagtacccagggcttccagaatttggaaaaaggagcagtgttttggtcgtggagctgtggggtgccgtgcgcgtccatgggctgggtctgcgctcaggctgccctgccgtggaagtgtgggtgtgggtatgggttgggggtctgggaccccaggcagcccaagtgggagcagggccggccggtggggaagggaggctctggcctggtgggaagtgcagctccgcgttgtcccttctcttgcagcggggatctgacgagcttttctctacttgtgtcactaacggaccgtttatcatgagcagcaactcggcttctgcagcaaacggaaatgacagcaagaagttcaaaggtgacagccgaagtgcaggcgtcccctctagagtgatccacatccggaagctccccatcgacgtcacggagggggaagtcatctccctggggctgccctttgggaaggtcaccaacctcctgatgctgaaggggaaaaaccaggccttcatcgagatgaacacggaggaggctgccaacaccatggtgaactactacacctcggtgacccctgtgctgcgcggccagcccatctacatccagtttctctgtgctctttctaccgcccccgcgtcctgtcccgggggctctcctaggatcccctttccgtaaaagcgtgtaacaagggtgtaaatatttataattttttatacctgttgtgagacccgaggggcggcggcgcggttttttatggtgacacaaatgtatattttgctaacagcaattccaggctcagtattgtgaccgcggagccacaggggaccccacgcacattccgttgccttacccgatggcttgtgacgcggagagaaccgattaaaaccgtttgagaaactcctcccttgtctagccctgtgttcgctgtggacgctgtagaggcaggttggccagtctgtacctggacttcgaataaatcttctgtatcctcgctccgttccgcctt

SEQ ID NO: 58 - DNA, 5572 bp, Homo sapien
caccgtggtgttggcagcctcctccgtgttcatctcgatgaaggcctggtttttccccttcagcatcaggaggttggtgaccttcccaaagggcagccccagggagatgacttccccctccgtgacgtcgatggggctattccggcgcctccactccgtcccccgcgggtctgctctgtgtgccatggacggcattgtcccagatatagccgttggtacaaagcggggatctgacgagcttttctctacttgtgtcactaacggaccgtttatcatgagcagcaactcggcttctgcagcaaacggaaatgacagcaagaagttcaaaggtgacagccgaagtgcaggcgtcccctctagagtgatccacatccggaagctccccatcgacgtcacggagggggaagtcatctccctggggctgccctttgggaaggtcaccaacctcctgatgctgaaggggaaaaaccaggtacctgagccgcgtttctccggggtgctcacaccgtgcaggcggggacgaggagggcccagcgctcactgcctccccaacaggccttcatcgagatgaacacggaggaggctgccaacaccatggtgaactactacacctcggtgacccctgtgctgcgcggccagcccatctacatccagttctccaaccacaaggagctgaagaccgacagctctcccaaccaggcgcgggcccaggcggccctgcaggcggtgaactcggtccagtcggggaacctggccttggctgcctcggcggcggccgtggacgcagggatggcgatggccgggcagagccccgtgctcaggatcatcgtggagaacctcttctaccctgtgaccctggatgtgctgcaccagattttctccaagttcggcacagtgttgaagatcatcaccttcaccaagaacaaccagttccaggccctgctgcagtatgcggaccccgtgagcgcccagcacgccaagctgtcgctggacgggcagaacatctacaacgcctgctgcacgctgcgcatcgacttttccaagctcaccagcctcaacgtcaagtacaacaatgacaagagccgtgactacacacgcccagacctgccttccggggacagccagccctcgctggaccagaccatggccgcggccttcgcctctccgtatgcaggagctggtttccctcccacctttgccattcctcaagctgcagggtattcaaacgcttggtcttggttccccagcgactgcatgcccacaccaccttcccaggcagctccgcatccacggcggcagcctgggcggactgggcactcgagtgccaggtcaggggcccttcccgggagaggggacgccacgtccacagagcaggcttggccagggcagtggtaggacagggctgtggaggcccacgtgtggacggcgccagccagaagccgctaatcgcacagtctttgtggtctggttcccttcaagcacctccgggcgagcgcgaggaccgccagtggttggagggatgtctctagtagttgaatttgagtggcctggtaagcgcgcggcccgaggctgagcagcatgaccggcggcgggacgtgtgtgcgtggccgtcctcccgcttcccttctgggaccggggcccggccgccccagtgctggccgtggacggagcagcgcgtgccgcccggcggccgcctcgtctgcatggaggcatgggcgcgcatgcgcggtggtcccgggacgggccctgcttgccgagggccccgtgtctgtgctggcggagccggagcttttctgtgctgtgggcggggcgcatgcagatgagcccaggcccggcccggcccgtgctgtgaggagaggcgggcgctggtgcaggagccggcgggtggctgtgcgggggtcgggcgaccccacaggcacccagggtagggccagagccagggccgcctcccgcgcggctcggctcctcggtgcatgaggacggggagcgtcggcctctcccactctgcggtggagtcgggggcgccgccgctcatctcacctcctgcttttccaggcctttccgttccgaacgtccacggcgccctggcccccctggccatcccctcggcggcggcggcagctgcggcggcaggtcggatcgccatcccgggcctggcgggggcaggaaattctgtattgctggtcagcaacctcaacccagaggtacgtgggcttttcctccgcgccgccgttcctcccggaagagcgagcaggggatgttgtgctcgggctcgggtcccggagcagcgccgcccctcgctgtgtctgcgcctctgccccggcagcccctctgctgcagcgctgagaccctccttttccaagatggcttgagttttcctcttttcctgaattcacatcttggttcgcgttttctcttgcatgatacgcagaatgaattattttttggttacccaaaggcaatctaaaaattacttggagctgagcagggcgcgcagttcagagccccagcaggccgccctgctggtcagcgggacacacagggttagcgcggcggggtgtgggcagcccctgtggctcgagagcctgtcacttaactggtggatccgttatttcccagaatggttaaattcccctcggggagagcttgggtgaaacaagaggcccaaaatatgtaactcttgatggatgggatcctcctggaatcagcatttcaggctgttctgtttcccggcaactcctgtgacttcctcaaggcggtgcccagcctggccctccctcgcgggggcccaggacgcactccctgcctgtgcctcttaccacgagccgggtgctgtccctccagctcctcctgagcgaggccgtgcactaacagactcgatctcccttcacgcctgtaatcgtccttagagactgacttgtgccacagctgcgggagacagcgctgctgcagggcttggctgaggtggccgcgagcggagctgcacgcgcgctcctggggggcgtggttgggatcggcttctgggagcccctccagcagcgctgtctctgccggcatgtgagtgaaggtgcttctcttaccgtgtgcccgtcgaggtaaacctgtaactggaatgtgtgtggagtgtgactgatagaacactacctgattcttatgtatttactgacctgtgtttttttgctactttttttcttttctccccttcccctttccctattttttttcttgccctgatccggaatttctttgccaactgactgcacggtacttctgcttcctgttgttgcttgaaacaaaacaaaaacataaacaaataaaaaacaaaaattccccctcaaaccctgctctccggaaaccaacctgcccttgaatattaacatcctgacaacttcatcatccatcaaccactgcacgcctgcggggactgtcttcctcgtgtggacgattggcaactcgccccccttgacctctccctctcccctgtccctccgctgccttgctctgctgtctctaaagagagtcacaccccaaagcctctttattcttttcggcgtctacggtgacgtgcagcgcgtgaagatcctgttcaataagaaggagaacgccctagtgcagatggcggacggcaaccaggcccagctggccatgagccacctgaacgggcacaagctgcacgggaagcccatccgcatcacgctctcgaagcaccagaacgtgcagctgccccgcgagggccaggaggaccagggcctgaccaaggactacggcaactcacccctgcaccgcttcaagaagccgggctccaagaacttccagaacatattcccgccctcggccacgctgcacctctccaacatcccgccctcagtctccgaggaggatctcaaggtcctgttttccagcaatgggggcgtcgtcaaaggattcaagttcttccagaaggaccgcaagatggcactgatccagatgggctccgtggaggaggcggtccaggccctcattgacctgcacaaccacgacctcggggagaaccaccacctgcgggtctccttctccaagtccaccatctaggggcacaggcccccacggccgggccccctggcgacaacttccatcattccagagaaaagccactttaaaaacagctgaagtgaccttagcagaccagagattttatttttttaaagagaaatcagtttacctgtttttaaaaaaattaaatctagttcaccttgctcaccctgcggtgacagggacagctcaggctcttggtgactgtggcagcgggagttcccggccctccacacccggggccagaccctcggggccatgccttggtggggcctgtgtcgggcgtggggcctgcaggtgggcgccccgaccacgacttggcttccttgtgccttaaaaaacctgccttcctgcagccacacacccacccggggtgtcctggggacccaaggggtgggggggtcacaccagagagaggcagggggcctggccggctcctgcaggatcatgcagctggggcgcggcggccgcggctgcgacaccccaaccccagccctctaatcaagtcacgtgattctcccttcaccccgcccccagggccttcccttctgcccccaggcgggctccccgctgctccagctgcggagctggtcgacataatctctgtattatatactttgcagttgcagacgtctgtgcctagcaatatttccagttgaccaaatattctaatcttttttcatttatatgcaaaagaaatagttttaagtaactttttatagcaagatgatacaatggtatgagtgtaatctaaacttccttgtggtattaccttgtatgctgttacttttattttattccttgtaattaagtcacaggcaggacccagtttccagagagcaggcggggccgcccagtgggtcaggcacagggagccccggtcctatcttagagcccctgagcttcagggaaggggcgggcgtgtcgccgcctctggcatcgcctccggttgccttacaccacgccttcacctgcagtcgcctagaaaacttgctctcaaacttcagggttttttcttccttcaaattttggaccaaagtctcatttctgtgttttgcctgcctctgatgctgggacccggaaggcgggcgctcctcctgtcttctctgtgctctttctaccgcccccgcgtcctgtcccgggggctctcctaggatcccctttccgtaaaagcgtgtaacaagggtgtaaatatttataattttttatacctgttgtgagacccgaggggcggcggcgcggttttttatggtgacacaaatgtatattttgctaacagcaattccaggctcagtattgtgaccgcggagccacaggggaccccacgcacattccgttgccttacccgatggcttgtgacgcggagagaaccgattaaaaccgtttgagaaactcctcccttgtctagccctgtgttcgctgtggacgctgtagaggcaggttggccagtctgtacctggacttcgaataaatcttctgtatcctcgctccgttccgcctt

SEQ ID NO: 59 - DNA, 6356 bp, Homo sapien
caccgtggtgttggcagcctcctccgtgttcatctcgatgaaggcctggtttttccccttcagcatcaggaggttggtgaccttcccaaagggcagccccagggagatgacttccccctccgtgacgtcgatggggctattccggcgcctccactccgtcccccgcgggtctgctctgtgtgccatggacggcattgtcccagatatagccgttggtacaaagcggggatctgacgagcttttctctacttgtgtcactaacggaccgtttatcatgagcagcaactcggcttctgcagcaaacggaaatgacagcaagaagttcaaaggtgacagccgaagtgcaggcgtcccctctagagtgatccacatccggaagctccccatcgacgtcacggagggggaagtcatctccctggggctgccctttgggaaggtcaccaacctcctgatgctgaaggggaaaaaccaggtacctgagccgcgtttctccggggtgctcacaccgtgcaggcggggacgaggagggcccagcgctcactgcctccccaacaggccttcatcgagatgaacacggaggaggctgccaacaccatggtgaactactacacctcggtgacccctgtgctgcgcggccagcccatctacatccagttctccaaccacaaggagctgaagaccgacagctctcccaaccaggcgcgggcccaggcggccctgcaggcggtgaactcggtccagtcggggaacctggccttggctgcctcggcggcggccgtggacgcagggatggcgatggccgggcagagccccgtgctcaggatcatcgtggagaacctcttctaccctgtgaccctggatgtgctgcaccagattttctccaagttcggcacagtgttgaagatcatcaccttcaccaagaacaaccagttccaggccctgctgcagtatgcggaccccgtgagcgcccagcacgccaagctgtcgctggacgggcagaacatctacaacgcctgctgcacgctgcgcatcgacttttccaagctcaccagcctcaacgtcaagtacaacaatgacaagagccgtgactacacacgcccagacctgccttccggggacagccagccctcgctggaccagaccatggccgcggccttcgggtaagaggctgcccgacgcggcgccagtgtgcagagtggtctattagggccgctcagtccggagccccggcggcacgggcccggccctgcaccagggtgatgcacctgctgctctctgcacggccagcacagcacggtccagtgtcccccacgtcgggaccacggcccccctggagcagcggatctgcccgcgaaggctctgccggggccgcccgccggccgggttggggcccatcccgcagcacagcgcccgctcgcggtggaggttgtgggtgcgatgattagtgtctcatttatttctaggtgcacctggtataatctcagcctctccgtatgcaggagctggtttccctcccacctttgccattcctcaagctgcagggtattcaaacgcttggtcttggttccccagcgactgcatgcccacaccaccttcccaggcagctccgcatccacggcggcagcctgggcggactgggcactcgagtgccaggtcaggggcccttcccgggagaggggacgccacgtccacagagcaggcttggccagggcagtggtaggacagggctgtggaggcccacgtgtggacggcgccagccagaagccgctaatcgcacagtctttgtggtctggttcccttcaagcacctccgggcgagcgcgaggaccgccagtggttggagggatgtctctagtagttgaatttgagtggcctggtaagcgcgcggcccgaggctgagcagcatgaccggcggcgggacgtgtgtgcgtggccgtcctcccgcttcccttctgggaccggggcccggccgccccagtgctggccgtggacggagcagcgcgtgccgcccggcggccgcctcgtctgcatggaggcatgggcgcgcatgcgcggtggtcccgggacgggccctgcttgccgagggccccgtgtctgtgctggcggagccggagcttttctgtgctgtgggcggggcgcatgcagatgagcccaggcccggcccggcccgtgctgtgaggagaggcgggcgctggtgcaggagccggcgggtggctgtgcgggggtcgggcgaccccacaggcacccagggtagggccagagccagggccgcctcccgcgcggctcggctcctcggtgcatgaggacggggagcgtcggcctctcccactctgcggtggagtcgggggcgccgccgctcatctcacctcctgcttttccaggcctttccgttccgaacgtccacggcgccctggcccccctggccatcccctcggcggcggcggcagctgcggcggcaggtcggatcgccatcccgggcctggcgggggcaggaaattctgtattgctggtcagcaacctcaacccagaggtacgtgggcttttcctccgcgccgccgttcctcccggaagagcgagcaggggatgttgtgctcgggctcgggtcccggagcagcgccgcccctcgctgtgtctgcgcctctgccccggcagcccctctgctgcagcgctgagaccctccttttccaagatggcttgagttttcctcttttcctgaattcacatcttggttcgcgttttctcttgcatgatacgcagaatgaattattttttggttacccaaaggcaatctaaaaattacttggagctgagcagggcgcgcagttcagagccccagcaggccgccctgctggtcagcgggacacacagggttagcgcggcggggtgtgggcagcccctgtggctcgagagcctgtcacttaactggtggatccgttatttcccagaatggttaaattcccctcggggagagcttgggtgaaacaagaggcccaaaatatgtaactcttgatggatgggatcctcctggaatcagcatttcaggctgttctgtttcccggcaactcctgtgacttcctcaaggcggtgcccagcctggccctccctcgcgggggcccaggacgcactccctgcctgtgcctcttaccacgagccgggtgctgtccctccagctcctcctgagcgaggccgtgcactaacagactcgatctcccttcacgcctgtaatcgtccttagagactgacttgtgccacagctgcgggagacagcgctgctgcagggcttggctgaggtggccgcgagcggagctgcacgcgcgctcctggggggcgtggttgggatcggcttctgggagcccctccagcagcgctgtctctgccggcatgtgagtgaaggtgcttctcttaccgtgtgcccgtcgaggtaaacctgtaactggaatgtgtgtggagtgtgactgatagaacactacctgattcttatgtatttactgacctgtgtttttttgctactttttttcttttctccccttcccctttccctattttttttcttgccctgatccggaatttctttgccaactgactgcacggtacttctgcttcctgttgttgcttgaaacaaaacaaaaacataaacaaataaaaaacaaaaattccccctcaaaccctgctctccggaaaccaacctgcccttgaatattaacatcctgacaacttcatcatccatcaaccactgcacgcctgcggggactgtcttcctcgtgtggacgattggcaactcgccccccttgacctctccctctcccctgtccctccgctgccttgctctgctgtctctaaagagagtcacaccccaaagcctctttattcttttcggtatgttatcgttcacacttttattaccttgttttcattaattgagatgattttgatgccctgagacgtattatgagtttgcggtttggcactctgatgctccgtggcatccgcctcgttttatggtttgctttcggtttgcgaattttatttggtcccgtagatacgtacgcatggtttatcgccctgcatgcttttcagagttagacctgtcggtggcatatgccaccgtggccacccgctggcagcttacctgtcctggatgctatgactttgctgaacggagctgctcctgttagcgcgccctgtggctgcgagacgcagctccgcagtggccgataaagcaaacccggccgggctgagccgggccttgtgggggtgcgcggggccggggctgacggggagatgggcggggcaggcagcaggagactcaggccccatccctgggcttttgaaggcgcgtctacggtgacgtgcagcgcgtgaagatcctgttcaataagaaggagaacgccctagtgcagatggcggacggcaaccaggcccagctggccatgagccacctgaacgggcacaagctgcacgggaagcccatccgcatcacgctctcgaagcaccagaacgtgcagctgccccgcgagggccaggaggaccagggcctgaccaaggactacggcaactcacccctgcaccgcttcaagaagccgggctccaagaacttccagaacatattcccgccctcggccacgctgcacctctccaacatcccgccctcagtctccgaggaggatctcaaggtcctgttttccagcaatgggggcgtcgtcaaaggattcaagttcttccagaaggaccgcaagatggcactgatccagatgggctccgtggaggaggcggtccaggccctcattgacctgcacaaccacgacctcggggagaaccaccacctgcgggtctccttctccaagtccaccatctaggggcacaggcccccacggccgggccccctggcgacaacttccatcattccagagaaaagccactttaaaaacagctgaagtgaccttagcagaccagagattttatttttttaaagagaaatcagtttacctgtttttaaaaaaattaaatctagttcaccttgctcaccctgcggtgacagggacagctcaggctcttggtgactgtggcagcgggagttcccggccctccacacccggggccagaccctcggggccatgccttggtggggcctgtgtcgggcgtggggcctgcaggtgggcgccccgaccacgacttggcttccttgtgccttaaaaaacctgccttcctgcagccacacacccacccggggtgtcctggggacccaaggggtgggggggtcacaccagagagaggcagggggcctggccggctcctgcaggatcatgcagctggggcgcggcggccgcggctgcgacaccccaaccccagccctctaatcaagtcacgtgattctcccttcaccccgcccccagggccttcccttctgcccccaggcgggctccccgctgctccagctgcggagctggtcgacataatctctgtattatatactttgcagttgcagacgtctgtgcctagcaatatttccagttgaccaaatattctaatcttttttcatttatatgcaaaagaaatagttttaagtaactttttatagcaagatgatacaatggtatgagtgtaatctaaacttccttgtggtattaccttgtatgctgttacttttattttattccttgtaattaagtcacaggcaggacccagtttccagagagcaggcggggccgcccagtgggtcaggcacagggagccccggtcctatcttagagcccctgagcttcagggaaggggcgggcgtgtcgccgcctctggcatcgcctccggttgccttacaccacgccttcacctgcagtcgcctagaaaacttgctctcaaacttcagggttttttcttccttcaaattttggaccaaagtctcatttctgtgttttgcctgcctctgatgctgggacccggaaggcgggcgctcctcctgtcttctctgtgctctttctaccgcccccgcgtcctgtcccgggggctctcctaggatcccctttccgtaaaagcgtgtaacaagggtgtaaatatttataattttttatacctgttgtgagacccgaggggcggcggcgcggttttttatggtgacacaaatgtatattttgctaacagcaattccaggctcagtattgtgaccgcggagccacaggggaccccacgcacattccgttgccttacccgatggcttgtgacgcggagagaaccgattaaaaccgtttgagaaactcctcccttgtctagccctgtgttcgctgtggacgctgtagaggcaggttggccagtctgtacctggacttcgaataaatcttctgtatcctcgctccgttccgcctt

SEQ ID NO: 60 - DNA, 3330 bp, Homo sapien
caccgtggtgttggcagcctcctccgtgttcatctcgatgaaggcctggtttttccccttcagcatcaggaggttggtgaccttcccaaagggcagccccagggagatgacttccccctccgtgacgtcgatggggctattccggcgcctccactccgtcccccgcgggtctgctctgtgtgccatggacggcattgtcccagatatagccgttggtacaaagcggggatctgacgagcttttctctacttgtgtcactaacggaccgtttatcatgagcagcaactcggcttctgcagcaaacggaaatgacagcaagaagttcaaaggtgacagccgaagtgcaggcgtcccctctagagtgatccacatccggaagctccccatcgacgtcacggagggggaagtcatctccctggggctgccctttgggaaggtcaccaacctcctgatgctgaaggggaaaaaccaggtacctgagccgcgtttctccggggtgctcacaccgtgcaggcggggacgaggagggcccagcgctcactgcctccccaacaggccttcatcgagatgaacacggaggaggctgccaacaccatggtgaactactacacctcggtgacccctgtgctgcgcggccagcccatctacatccagttctccaaccacaaggagctgaagaccgacagctctcccaaccaggcgcgggcccaggcggccctgcaggcggtgaactcggtccagtcggggaacctggccttggctgcctcggcggcggccgtggacgcagggatggcgatggccgggcagagccccgtgctcaggatcatcgtggagaacctcttctaccctgtgaccctggatgtgctgcaccagattttctccaagttcggcacagtgttgaagatcatcaccttcaccaagaacaaccagttccaggccctgctgcagtatgcggaccccgtgagcgcccagcacgccaagctgtcgctggacgggcagaacatctacaacgcctgctgcacgctgcgcatcgacttttccaagctcaccagcctcaacgtcaagtacaacaatgacaagagccgtgactacacacgcccagacctgccttccggggacagccagccctcgctggaccagaccatggccgcggccttcggcctttccgttccgaacgtccacggcgccctggcccccctggccatcccctcggcggcggcggcagctgcggcggcaggtcggatcgccatcccgggcctggcgggggcaggaaattctgtattgctggtcagcaacctcaacccagaggcgtctacggtgacgtgcagcgcgtgaagatcctgttcaataagaaggagaacgccctagtgcagatggcggacggcaaccaggcccagctggccatgagccacctgaacgggcacaagctgcacgggaagcccatccgcatcacgctctcgaagcaccagaacgtgcagctgccccgcgagggccaggaggaccagggcctgaccaaggactacggcaactcacccctgcaccgcttcaagaagccgggctccaagaacttccagaacatattcccgccctcggccacgctgcacctctccaacatcccgccctcagtctccgaggaggatctcaaggtcctgttttccagcaatgggggcgtcgtcaaaggattcaagttcttccagaaggaccgcaagatggcactgatccagatgggctccgtggaggaggcggtccaggccctcattgacctgcacaaccacgacctcggggagaaccaccacctgcgggtctccttctccaagtccaccatctaggggcacaggcccccacggccgggccccctggcgacaacttccatcattccagagaaaagccactttaaaaacagctgaagtgaccttagcagaccagagattttatttttttaaagagaaatcagtttacctgtttttaaaaaaattaaatctagttcaccttgctcaccctgcggtgacagggacagctcaggctcttggtgactgtggcagcgggagttcccggccctccacacccggggccagaccctcggggccatgccttggtggggcctgtgtcgggcgtggggcctgcaggtgggcgccccgaccacgacttggcttccttgtgccttaaaaaacctgccttcctgcagccacacacccacccggggtgtcctggggacccaaggggtgggggggtcacaccagagagaggcagggggcctggccggctcctgcaggatcatgcagctggggcgcggcggccgcggctgcgacaccccaaccccagccctctaatcaagtcacgtgattctcccttcaccccgcccccagggccttcccttctgcccccaggcgggctccccgctgctccagctgcggagctggtcgacataatctctgtattatatactttgcagttgcagacgtctgtgcctagcaatatttccagttgaccaaatattctaatcttttttcatttatatgcaaaagaaatagttttaagtaactttttatagcaagatgatacaatggtatgagtgtaatctaaacttccttgtggtattaccttgtatgctgttacttttattttattccttgtaattaagtcacaggcaggacccagtttccagagagcaggcggggccgcccagtgggtcaggcacagggagccccggtcctatcttagagcccctgagcttcagggaaggggcgggcgtgtcgccgcctctggcatcgcctccggttgccttacaccacgccttcacctgcagtcgcctagaaaacttgctctcaaacttcagggttttttcttccttcaaattttggaccaaagtctcatttctgtgttttgcctgcctctgatgctgggacccggaaggcgggcgctcctcctgtcttctctgtgctctttctaccgcccccgcgtcctgtcccgggggctctcctaggatcccctttccgtaaaagcgtgtaacaagggtgtaaatatttataattttttatacctgttgtgagacccgaggggcggcggcgcggttttttatggtgacacaaatgtatattttgctaacagcaattccaggctcagtattgtgaccgcggagccacaggggaccccacgcacattccgttgccttacccgatggcttgtgacgcggagagaaccgattaaaaccgtttgagaaactcctcccttgtctagccctgtgttcgctgtggacgctgtagaggcaggttggccagtctgtacctggacttcgaataaatcttctgtatcctcgctccgttccgcctt

SEQ ID NO: 61 - DNA, 6229 bp, Homo sapien
caccgtggtgttggcagcctcctccgtgttcatctcgatgaaggcctggtttttccccttcagcatcaggaggttggtgaccttcccaaagggcagccccagggagatgacttccccctccgtgacgtcgatggggctattccggcgcctccactccgtcccccgcgggtctgctctgtgtgccatggacggcattgtcccagatatagccgttggtacaaagcggggatctgacgagcttttctctacttgtgtcactaacggaccgtttatcatgagcagcaactcggcttctgcagcaaacggaaatgacagcaagaagttcaaaggtgacagccgaagtgcaggcgtcccctctagagtgatccacatccggaagctccccatcgacgtcacggagggggaagtcatctccctggggctgccctttgggaaggtcaccaacctcctgatgctgaaggggaaaaaccaggtacctgagccgcgtttctccggggtgctcacaccgtgcaggcggggacgaggagggcccagcgctcactgcctccccaacaggccttcatcgagatgaacacggaggaggctgccaacaccatggtgaactactacacctcggtgacccctgtgctgcgcggccagcccatctacatccagttctccaaccacaaggagctgaagaccgacagctctcccaaccaggcgcgggcccaggcggccctgcaggcggtgaactcggtccagtcggggaacctggccttggctgcctcggcggcggccgtggacgcagggatggcgatggccgggcagagccccgtgctcaggatcatcgtggagaacctcttctaccctgtgaccctggatgtgctgcaccagattttctccaagttcggcacagtgttgaagatcatcaccttcaccaagaacaaccagttccaggccctgctgcagtatgcggaccccgtgagcgcccagcacgccaagctgtcgctggacgggcagaacatctacaacgcctgctgcacgctgcgcatcgacttttccaagctcaccagcctcaacgtcaagtacaacaatgacaagagccgtgactacacacgcccagacctgccttccggggacagccagccctcgctggaccagaccatggccgcggccttcgcctctccgtatgcaggagctggtttccctcccacctttgccattcctcaagctgcagggtattcaaacgcttggtcttggttccccagcgactgcatgcccacaccaccttcccaggcagctccgcatccacggcggcagcctgggcggactgggcactcgagtgccaggtcaggggcccttcccgggagaggggacgccacgtccacagagcaggcttggccagggcagtggtaggacagggctgtggaggcccacgtgtggacggcgccagccagaagccgctaatcgcacagtctttgtggtctggttcccttcaagcacctccgggcgagcgcgaggaccgccagtggttggagggatgtctctagtagttgaatttgagtggcctggtaagcgcgcggcccgaggctgagcagcatgaccggcggcgggacgtgtgtgcgtggccgtcctcccgcttcccttctgggaccggggcccggccgccccagtgctggccgtggacggagcagcgcgtgccgcccggcggccgcctcgtctgcatggaggcatgggcgcgcatgcgcggtggtcccgggacgggccctgcttgccgagggccccgtgtctgtgctggcggagccggagcttttctgtgctgtgggcggggcgcatgcagatgagcccaggcccggcccggcccgtgctgtgaggagaggcgggcgctggtgcaggagccggcgggtggctgtgcgggggtcgggcgaccccacaggcacccagggtagggccagagccagggccgcctcccgcgcggctcggctcctcggtgcatgaggacggggagcgtcggcctctcccactctgcggtggagtcgggggcgccgccgctcatctcacctcctgcttttccaggcctttccgttccgaacgtccacggcgccctggcccccctggccatcccctcggcggcggcggcagctgcggcggcaggtcggatcgccatcccgggcctggcgggggcaggaaattctgtattgctggtcagcaacctcaacccagaggtacgtgggcttttcctccgcgccgccgttcctcccggaagagcgagcaggggatgttgtgctcgggctcgggtcccggagcagcgccgcccctcgctgtgtctgcgcctctgccccggcagcccctctgctgcagcgctgagaccctccttttccaagatggcttgagttttcctcttttcctgaattcacatcttggttcgcgttttctcttgcatgatacgcagaatgaattattttttggttacccaaaggcaatctaaaaattacttggagctgagcagggcgcgcagttcagagccccagcaggccgccctgctggtcagcgggacacacagggttagcgcggcggggtgtgggcagcccctgtggctcgagagcctgtcacttaactggtggatccgttatttcccagaatggttaaattcccctcggggagagcttgggtgaaacaagaggcccaaaatatgtaactcttgatggatgggatcctcctggaatcagcatttcaggctgttctgtttcccggcaactcctgtgacttcctcaaggcggtgcccagcctggccctccctcgcgggggcccaggacgcactccctgcctgtgcctcttaccacgagccgggtgctgtccctccagctcctcctgagcgaggccgtgcactaacagactcgatctcccttcacgcctgtaatcgtccttagagactgacttgtgccacagctgcgggagacagcgctgctgcagggcttggctgaggtggccgcgagcggagctgcacgcgcgctcctggggggcgtggttgggatcggcttctgggagcccctccagcagcgctgtctctgccggcatgtgagtgaaggtgcttctcttaccgtgtgcccgtcgaggtaaacctgtaactggaatgtgtgtggagtgtgactgatagaacactacctgattcttatgtatttactgacctgtgtttttttgctactttttttcttttctccccttcccctttccctattttttttcttgccctgatccggaatttctttgccaactgactgcacggtacttctgcttcctgttgttgcttgaaacaaaacaaaaacataaacaaataaaaaacaaaaattccccctcaaaccctgctctccggaaaccaacctgcccttgaatattaacatcctgacaacttcatcatccatcaaccactgcacgcctgcggggactgtcttcctcgtgtggacgattggcaactcgccccccttgacctctccctctcccctgtccctccgctgccttgctctgctgtctctaaagagagtcacaccccaaagcctctttattcttttcggtatgttatcgttcacacttttattaccttgttttcattaattgagatgattttgatgccctgagacgtattatgagtttgcggtttggcactctgatgctccgtggcatccgcctcgttttatggtttgctttcggtttgcgaattttatttggtcccgtagatacgtacgcatggtttatcgccctgcatgcttttcagagttagacctgtcggtggcatatgccaccgtggccacccgctggcagcttacctgtcctggatgctatgactttgctgaacggagctgctcctgttagcgcgccctgtggctgcgagacgcagctccgcagtggccgataaagcaaacccggccgggctgagccgggccttgtgggggtgcgcggggccggggctgacggggagatgggcggggcaggcagcaggagactcaggccccatccctgggcttttgaaggcgcgtctacggtgacgtgcagcgcgtgaagatcctgttcaataagaaggagaacgccctagtgcagatggcggacggcaaccaggcccagctggccatgagccacctgaacgggcacaagctgcacgggaagcccatccgcatcacgctctcgaagcaccagaacgtgcagctgccccgcgagggccaggaggaccagggcctgaccaaggactacggcaactcacccctgcaccgcttcaagaagccgggctccaagaacttccagaacatattcccgccctcggccacgctgcacctctccaacatcccgccctcagtctccgaggaggatctcaaggtcctgttttccagcaatgggggcgtcgtcaaaggattcaagttcttccagaaggaccgcaagatggcactgatccagatgggctccgtggaggaggcggtccaggccctcattgacctgcacaaccacgacctcggggagaaccaccacctgcgggtctccttctccaagtccaccatctaggggcacaggcccccacggccgggccccctggcgacaacttccatcattccagagaaaagccactttaaaaacagctgaagtgaccttagcagaccagagattttatttttttaaagagaaatcagtttacctgtttttaaaaaaattaaatctagttcaccttgctcaccctgcggtgacagggacagctcaggctcttggtgactgtggcagcgggagttcccggccctccacacccggggccagaccctcggggccatgccttggtggggcctgtgtcgggcgtggggcctgcaggtgggcgccccgaccacgacttggcttccttgtgccttaaaaaacctgccttcctgcagccacacacccacccggggtgtcctggggacccaaggggtgggggggtcacaccagagagaggcagggggcctggccggctcctgcaggatcatgcagctggggcgcggcggccgcggctgcgacaccccaaccccagccctctaatcaagtcacgtgattctcccttcaccccgcccccagggccttcccttctgcccccaggcgggctccccgctgctccagctgcggagctggtcgacataatctctgtattatatactttgcagttgcagacgtctgtgcctagcaatatttccagttgaccaaatattctaatcttttttcatttatatgcaaaagaaatagttttaagtaactttttatagcaagatgatacaatggtatgagtgtaatctaaacttccttgtggtattaccttgtatgctgttacttttattttattccttgtaattaagtcacaggcaggacccagtttccagagagcaggcggggccgcccagtgggtcaggcacagggagccccggtcctatcttagagcccctgagcttcagggaaggggcgggcgtgtcgccgcctctggcatcgcctccggttgccttacaccacgccttcacctgcagtcgcctagaaaacttgctctcaaacttcagggttttttcttccttcaaattttggaccaaagtctcatttctgtgttttgcctgcctctgatgctgggacccggaaggcgggcgctcctcctgtcttctctgtgctctttctaccgcccccgcgtcctgtcccgggggctctcctaggatcccctttccgtaaaagcgtgtaacaagggtgtaaatatttataattttttatacctgttgtgagacccgaggggcggcggcgcggttttttatggtgacacaaatgtatattttgctaacagcaattccaggctcagtattgtgaccgcggagccacaggggaccccacgcacattccgttgccttacccgatggcttgtgacgcggagagaaccgattaaaaccgtttgagaaactcctcccttgtctagccctgtgttcgctgtggacgctgtagaggcaggttggccagtctgtacctggacttcgaataaatcttctgtatcctcgctccgttccgccttcgttgctggcttcctctttctgtgccgcgggcggccccgactcccgcccgggtgtccgccgaagcgccaggtggggccacgggcggggtgggcccggccctgagagtgggggtccctgcgtggggcgtgcgggccagagcgaatgaccaagagccggacctcggtttctgccgctttattgagcatccgcgcggccgc

SEQ ID NO: 62 - DNA, 5745 bp, Homo sapien
caccgtggtgttggcagcctcctccgtgttcatctcgatgaaggcctggtttttccccttcagcatcaggaggttggtgaccttcccaaagggcagccccagggagatgacttccccctccgtgacgtcgatggggctattccggcgcctccactccgtcccccgcgggtctgctctgtgtgccatggacggcattgtcccagatatagccgttggtacaaagcggggatctgacgagcttttctctacttgtgtcactaacggaccgtttatcatgagcagcaactcggcttctgcagcaaacggaaatgacagcaagaagttcaaaggtgacagccgaagtgcaggcgtcccctctagagtgatccacatccggaagctccccatcgacgtcacggagggggaagtcatctccctggggctgccctttgggaaggtcaccaacctcctgatgctgaaggggaaaaaccaggtacctgagccgcgtttctccggggtgctcacaccgtgcaggcggggacgaggagggcccagcgctcactgcctccccaacaggccttcatcgagatgaacacggaggaggctgccaacaccatggtgaactactacacctcggtgacccctgtgctgcgcggccagcccatctacatccagttctccaaccacaaggagctgaagaccgacagctctcccaaccaggcgcgggcccaggcggccctgcaggcggtgaactcggtccagtcggggaacctggccttggctgcctcggcggcggccgtggacgcagggatggcgatggccgggcagagccccgtgctcaggatcatcgtggagaacctcttctaccctgtgaccctggatgtgctgcaccagattttctccaagttcggcacagtgttgaagatcatcaccttcaccaagaacaaccagttccaggccctgctgcagtatgcggaccccgtgagcgcccagcacgccaagctgtcgctggacgggcagaacatctacaacgcctgctgcacgctgcgcatcgacttttccaagctcaccagcctcaacgtcaagtacaacaatgacaagagccgtgactacacacgcccagacctgccttccggggacagccagccctcgctggaccagaccatggccgcggccttcgcctctccgtatgcaggagctggtttccctcccacctttgccattcctcaagctgcagggtattcaaacgcttggtcttggttccccagcgactgcatgcccacaccaccttcccaggcagctccgcatccacggcggcagcctgggcggactgggcactcgagtgccaggtcaggggcccttcccgggagaggggacgccacgtccacagagcaggcttggccagggcagtggtaggacagggctgtggaggcccacgtgtggacggcgccagccagaagccgctaatcgcacagtctttgtggtctggttcccttcaagcacctccgggcgagcgcgaggaccgccagtggttggagggatgtctctagtagttgaatttgagtggcctggtaagcgcgcggcccgaggctgagcagcatgaccggcggcgggacgtgtgtgcgtggccgtcctcccgcttcccttctgggaccggggcccggccgccccagtgctggccgtggacggagcagcgcgtgccgcccggcggccgcctcgtctgcatggaggcatgggcgcgcatgcgcggtggtcccgggacgggccctgcttgccgagggccccgtgtctgtgctggcggagccggagcttttctgtgctgtgggcggggcgcatgcagatgagcccaggcccggcccggcccgtgctgtgaggagaggcgggcgctggtgcaggagccggcgggtggctgtgcgggggtcgggcgaccccacaggcacccagggtagggccagagccagggccgcctcccgcgcggctcggctcctcggtgcatgaggacggggagcgtcggcctctcccactctgcggtggagtcgggggcgccgccgctcatctcacctcctgcttttccaggcctttccgttccgaacgtccacggcgccctggcccccctggccatcccctcggcggcggcggcagctgcggcggcaggtcggatcgccatcccgggcctggcgggggcaggaaattctgtattgctggtcagcaacctcaacccagaggtacgtgggcttttcctccgcgccgccgttcctcccggaagagcgagcaggggatgttgtgctcgggctcgggtcccggagcagcgccgcccctcgctgtgtctgcgcctctgccccggcagcccctctgctgcagcgctgagaccctccttttccaagatggcttgagttttcctcttttcctgaattcacatcttggttcgcgttttctcttgcatgatacgcagaatgaattattttttggttacccaaaggcaatctaaaaattacttggagctgagcagggcgcgcagttcagagccccagcaggccgccctgctggtcagcgggacacacagggttagcgcggcggggtgtgggcagcccctgtggctcgagagcctgtcacttaactggtggatccgttatttcccagaatggttaaattcccctcggggagagcttgggtgaaacaagaggcccaaaatatgtaactcttgatggatgggatcctcctggaatcagcatttcaggctgttctgtttcccggcaactcctgtgacttcctcaaggcggtgcccagcctggccctccctcgcgggggcccaggacgcactccctgcctgtgcctcttaccacgagccgggtgctgtccctccagctcctcctgagcgaggccgtgcactaacagactcgatctcccttcacgcctgtaatcgtccttagagactgacttgtgccacagctgcgggagacagcgctgctgcagggcttggctgaggtggccgcgagcggagctgcacgcgcgctcctggggggcgtggttgggatcggcttctgggagcccctccagcagcgctgtctctgccggcatgtgagtgaaggtgcttctcttaccgtgtgcccgtcgaggtaaacctgtaactggaatgtgtgtggagtgtgactgatagaacactacctgattcttatgtatttactgacctgtgtttttttgctactttttttcttttctccccttcccctttccctattttttttcttgccctgatccggaatttctttgccaactgactgcacggtacttctgcttcctgttgttgcttgaaacaaaacaaaaacataaacaaataaaaaacaaaaattccccctcaaaccctgctctccggaaaccaacctgcccttgaatattaacatcctgacaacttcatcatccatcaaccactgcacgcctgcggggactgtcttcctcgtgtggacgattggcaactcgccccccttgacctctccctctcccctgtccctccgctgccttgctctgctgtctctaaagagagtcacaccccaaagcctctttattcttttcggtatgttatcgttcacacttttattaccttgttttcattaattgagatgattttgatgccctgagacgtattatgagtttgcggtttggcactctgatgctccgtggcatccgcctcgttttatggtttgctttcggtttgcgaattttatttggtcccgtagatacgtacgcatggtttatcgccctgcatgcttttcagagttagacctgtcggtggcatatgccaccgtggccacccgctggcagcttacctgtcctggatgctatgactttgctgaacggagctgctcctgttagcgcgccctgtggctgcgagacgcagctccgcagtggccgataaagcaaacccggccgggctgagccgggccttgtgggggtgcgcggggccggggctgacggggagatgggcggggcaggcagcaggagactcaggccccatccctgggcttttgaaggcgcgtctacggtgacgtgcagcgcgtgaagatcctgttcaataagaaggagaacgccctagtgcagatggcggacggcaaccaggcccagctggccatgagccacctgaacgggcacaagctgcacgggaagcccatccgcatcacgctctcgaagcaccagaacgtgcagctgccccgcgagggccaggaggaccagggcctgaccaaggactacggcaactcacccctgcaccgcttcaagaagccgggctccaagaacttccagaacatattcccgccctcggccacgctgcacctctccaacatcccgccctcagtctccgaggaggatctcaaggtcctgttttccagcaatgggggcgtcgtcaaaggattcaagttcttccagaaggaccgcaagatggcactgatccagatgggctccgtggaggaggcggtccaggccctcattgacctgcacaaccacgacctcggggagaaccaccacctgcgggtctccttctccaagtccaccatctaggggcacaggcccccacggccgggccccctggcgacaacttccatcattccagagaaaagccactttaaaaacagctgaagtgaccttagcagaccagagattttatttttttaaagagaaatcagtttacctgtttttaaaaaaattaaatctagttcaccttgctcaccctgcggtgacagggacagctcaggctcttggtgactgtggcagcgggagttcccggccctccacacccggggccagaccctcggggccatgccttggtggggcctgtgtcgggcgtggggcctgcaggtgggcgccccgaccacgacttggcttccttgtgccttaaaaaacctgccttcctgcagccacacacccacccggggtgtcctggggacccaaggggtgggggggtcacaccagagagaggcagggggcctggccggctcctgcaggatcatgcagctggggcgcggcggccgcggctgcgacaccccaaccccagccctctaatcaagtcacgtgattctcccttcaccccgcccccagggccttcccttctgcccccaggcgggctccccgctgctccagctgcggagctggtcgacataatctctgtattatatactttgcagttgcagacgtctgtgcctagcaatatttccagttgaccaaatattctaatcttttttcatttatatgcaaaagaaatagttttaagtaactttttatagcaagatgatacaatggtatgagtgtaatctaaacttccttgtggtattaccttgtatgctgttacttttattttattccttgtaattaagtcacaggcaggacccagtttccagagagcaggcggggccgcccagtgggtcaggcacagggagccccggtcctatcttagagcccctgagcttcagggaaggggcgggcgttctctgtgctctttctaccgcccccgcgtcctgtcccgggggctctcctaggatcccctttccgtaaaagcgtgtaacaagggtgtaaatatttataattttttatacctgttgtgagacccgaggggcggcggcgcggttttttatggtgacacaaatgtatattttgctaacagcaattccaggctcagtattgtgaccgcggagccacaggggaccccacgcacattccgttgccttacccgatggcttgtgacgcggagagaaccgattaaaaccgtttgagaaactc

SEQ ID NO: 63 - DNA, 5547 bp, Homo sapien
caccgtggtgttggcagcctcctccgtgttcatctcgatgaaggcctggtttttccccttcagcatcaggaggttggtgaccttcccaaagggcagccccagggagatgacttccccctccgtgacgtcgatggggctattccggcgcctccactccgtcccccgcgggtctgctctgtgtgccatggacggcattgtcccagatatagccgttggtacaaagcggggatctgacgagcttttctctacttgtgtcactaacggaccgtttatcatgagcagcaactcggcttctgcagcaaacggaaatgacagcaagaagttcaaaggtgacagccgaagtgcaggcgtcccctctagagtgatccacatccggaagctccccatcgacgtcacggagggggaagtcatctccctggggctgccctttgggaaggtcaccaacctcctgatgctgaaggggaaaaaccaggtacctgagccgcgtttctccggggtgctcacaccgtgcaggcggggacgaggagggcccagcgctcactgcctccccaacaggccttcatcgagatgaacacggaggaggctgccaacaccatggtgaactactacacctcggtgacccctgtgctgcgcggccagcccatctacatccagttctccaaccacaaggagctgaagaccgacagctctcccaaccaggcgcgggcccaggcggccctgcaggcggtgaactcggtccagtcggggaacctggccttggctgcctcggcggcggccgtggacgcagggatggcgatggccgggcagagccccgtgctcaggatcatcgtggagaacctcttctaccctgtgaccctggatgtgctgcaccagattttctccaagttcggcacagtgttgaagatcatcaccttcaccaagaacaaccagttccaggccctgctgcagtatgcggaccccgtgagcgcccagcacgccaagctgtcgctggacgggcagaacatctacaacgcctgctgcacgctgcgcatcgacttttccaagctcaccagcctcaacgtcaagtacaacaatgacaagagccgtgactacacacgcccagacctgccttccggggacagccagccctcgctggaccagaccatggccgcggccttcgcctctccgtatgcaggagctggtttccctcccacctttgccattcctcaagctgcagggtattcaaacgcttggtcttggttccccagcgactgcatgcccacaccaccttcccaggcagctccgcatccacggcggcagcctgggcggactgggcactcgagtgccaggtcaggggcccttcccgggagaggggacgccacgtccacagagcaggcttggccagggcagtggtaggacagggctgtggaggcccacgtgtggacggcgccagccagaagccgctaatcgcacagtctttgtggtctggttcccttcaagcacctccgggcgagcgcgaggaccgccagtggttggagggatgtctctagtagttgaatttgagtggcctggtaagcgcgcggcccgaggctgagcagcatgaccggcggcgggacgtgtgtgcgtggccgtcctcccgcttcccttctgggaccggggcccggccgccccagtgctggccgtggacggagcagcgcgtgccgcccggcggccgcctcgtctgcatggaggcatgggcgcgcatgcgcggtggtcccgggacgggccctgcttgccgagggccccgtgtctgtgctggcggagccggagcttttctgtgctgtgggcggggcgcatgcagatgagcccaggcccggcccggcccgtgctgtgaggagaggcgggcgctggtgcaggagccggcgggtggctgtgcgggggtcgggcgaccccacaggcacccagggtagggccagagccagggccgcctcccgcgcggctcggctcctcggtgcatgaggacggggagcgtcggcctctcccactctgcggtggagtcgggggcgccgccgctcatctcacctcctgcttttccaggcctttccgttccgaacgtccacggcgccctggcccccctggccatcccctcggcggcggcggcagctgcggcggcaggtcggatcgccatcccgggcctggcgggggcaggaaattctgtattgctggtcagcaacctcaacccagaggtacgtgggcttttcctccgcgccgccgttcctcccggaagagcgagcaggggatgttgtgctcgggctcgggtcccggagcagcgccgcccctcgctgtgtctgcgcctctgccccggcagcccctctgctgcagcgctgagaccctccttttccaagatggcttgagttttcctcttttcctgaattcacatcttggttcgcgttttctcttgcatgatacgcagaatgaattattttttggttacccaaaggcaatctaaaaattacttggagctgagcagggcgcgcagttcagagccccagcaggccgccctgctggtcagcgggacacacagggttagcgcggcggggtgtgggcagcccctgtggctcgagagcctgtcacttaactggtggatccgttatttcccagaatggttaaattcccctcggggagagcttgggtgaaacaagaggcccaaaatatgtaactcttgatggatgggatcctcctggaatcagcatttcaggctgttctgtttcccggcaactcctgtgacttcctcaaggcggtgcccagcctggccctccctcgcgggggcccaggacgcactccctgcctgtgcctcttaccacgagccgggtgctgtccctccagctcctcctgagcgaggccgtgcactaacagactcgatctcccttcacgcctgtaatcgtccttagagactgacttgtgccacagctgcgggagacagcgctgctgcagggcttggctgaggtggccgcgagcggagctgcacgcgcgctcctggggggcgtggttgggatcggcttctgggagcccctccagcagcgctgtctctgccggcatgtgagtgaaggtgcttctcttaccgtgtgcccgtcgaggtaaacctgtaactggaatgtgtgtggagtgtgactgatagaacactacctgattcttatgtatttactgacctgtgtttttttgctactttttttcttttctccccttcccctttccctattttttttcttgccctgatccggaatttctttgccaactgactgcacggtacttctgcttcctgttgttgcttgaaacaaaacaaaaacataaacaaataaaaaacaaaaattccccctcaaaccctgctctccggaaaccaacctgcccttgaatattaacatcctgacaacttcatcatccatcaaccactgcacgcctgcggggactgtcttcctcgtgtggacgattggcaactcgccccccttgacctctccctctcccctgtccctccgctgccttgctctgctgtctctaaagagagtcacaccccaaagcctctttattcttttcggtatgttatcgttcacacttttattaccttgttttcattaattgagatgattttgatgccctgagacgtattatgagtttgcggtttggcactctgatgctccgtggcatccgcctcgttttatggtttgctttcggtttgcgaattttatttggtcccgtagatacgtacgcatggtttatcgccctgcatgcttttcagagttagacctgtcggtggcatatgccaccgtggccacccgctggcagcttacctgtcctggatgctatgactttgctgaacggagctgctcctgttagcgcgccctgtggctgcgagacgcagctccgcagtggccgataaagcaaacccggccgggctgagccgggccttgtgggggtgcgcggggccggggctgacggggagatgggcggggcaggcagcaggagactcaggccccatccctgggcttttgaaggcgcgtctacggtgacgtgcagcgcgtgaagatcctgttcaataagaaggagaacgccctagtgcagatggcggacggcaaccaggcccagctggccatgagccacctgaacgggcacaagctgcacgggaagcccatccgcatcacgctctcgaagcaccagaacgtgcagctgccccgcgagggccaggaggaccagggcctgaccaaggactacggcaactcacccctgcaccgcttcaagaagccgggctccaagaacttccagaacatattcccgccctccccacggccgggccccctggcgacaacttccatcattccagagaaaagccactttaaaaacagctgaagtgaccttagcagaccagagattttatttttttaaagagaaatcagtttacctgtttttaaaaaaattaaatctagttcaccttgctcaccctgcggtgacagggacagctcagggccggctcctgcaggatcatgcagctggggcgcggcggccgcggctgcgacaccccaaccccagccctctaatcaagtcacgtgattctcccttcaccccgcccccagggccttcccttctgcccccaggcgggctccccgctgctccagctgcggagctggtcgacataatctctgtattatatactttgcagttgcagacgtctgtgcctagcaatatttccagttgaccaaatattctaatcttttttcatttatatgcaaaagaaatagttttaagtaactttttatagcaagatgatacaatggtatgagtgtaatctaaacttccttgtggtattaccttgtatgctgttacttttattttattccttgtaattaagtcacaggcaggacccagtttccagagagcaggcggggccgcccagtgggtcaggcacagggagccccggtcctatcttagagcccctgagcttcagggaaggggcgggcgtgtcgccgcctctggcatcgcctccggttgccttacaccacgccttcacctgcagtcgcctagaaaacttgctctcaaacttcagggttttttcttccttcaaattttggaccaaagtctcatttctgtgttttgcctgcctctgatgctgggacccggaaggcgggcgctcctcctgtcttctctgtgctctttctaccgcccccgcgtcctgtcccgggggctctcctaggatcccctttccgtaaaagcgtgtaacaagggtgtaaatatttataattttttatacctgttgtgagacccgaggggcggcggcgcggttttttatggtgacacaaatgtatattttgctaacagcaattccaggctcagtattgtgaccgcggagccacaggggaccccacgcacattccgttgccttacccgatggcttgtgacgcggagagaaccgattaaaaccgtttgagaaactcctcccttgtctagccctgtgttcgctgtggacgctgtagaggcaggttggccagtctgtacctggacttcgaataaatcttctgtatcctcgctccgttccgcctt

SEQ ID NO: 64 - DNA, 944 bp, Homo sapien
aacataggtcagtacaggccgggttatcgtcgcaagaaagcctgagtcctgtcctttctctctccccggacagcatgagcttcaccactcgctccaccttctccaccaactaccggtccctgggctctgtccaggcgcccagctacggcgcccggccggtcagcagcgcggccagcgtctatgcaggcgctgggggctctggttcccggatctccgtgtcccgctccaccagcttcaggggcggcatggggtccgggggcctggccaccgggatagccgggggtctggcaggaatgggaggcatccagaacgagaaggagaccatgcaaagcctgaacgaccgcctggcctcttacctggacagagtgaggagcctggagaccgagaaccggaggctggagagcaaaatccgggagcacttggagaagaagggaccccaggtcagagactggagccattacttcaagatcatcgaggacctgagggctcagatcttcgcaaatactgtggacaatgcccgcatcgttctgcagattgacaatgcccgtcttgctgctgatgactttagagtcaagtatgagacagagctggccatgcgccagtctgtggagaacgacatccatgggctccgcaaggtcattgatgacaccaatatcacacgactgcagctggagacagagatcgaggctctcaaggaggagctgctcttcatgaagaagaaccacgaagaggacsgtacaggsctacaagmccmgatgscmgstctgggtgmcgyggaggagatgcccccaacaccgggactggcagaccaggcgactcggcaagagacgagtggtcgagaccgaggggagaaggtcgccagaatggggagccacggcccaagcggagtgtgaacgagccggtagagcggcccgggagcgacgatagcgggcacgggggcacag

SEQ ID NO: 65 - DNA, 1426 bp, Homo sapien
gaaagcagcctcgagggccaacaacacctgctgtccgtgtccatgcccggttggccaccccgtttctgggggcatgagcttcaccactcgctccaccttctccaccaactaccggtccctgggctctgtccaggcgcccagctacggcgcccggccggtcagcagcgcggccagcgtctatgcaggcgctgggggctctggttcccggatctccgtgtcccgctccaccagcttcaggggcggcatggggtccgggggcctggccaccgggatagccgggggtctggcaggaatgggaggcatccagaacgagaaggagaccatgcaaagcctgaacgaccgcctggcctcttacctggacagagtgaggagcctggagaccgagaaccggaggctggagagcaaaatccgggagcacttggagaagaagggaccccaggtcagagactggagccattacttcaagatcatcgaggacctgagggctcagatcttcgcaaatactgtggacaatgcccgcatcgttctgcagattgacaatgcccgtcttgctgctgatgactttagagtcaagtatgagacagagctggccatgcgccagtctgtggagaacgacatccatgggctccgcaaggtcattgatgacaccaatatcacacgactgcagctggagacagagatcgaggctctcaaggaggagctgctcttcatgaagaagaaccacgaagaggaagtaaaaggcctacaagcccagattgccagctctgggttgaccgtggaggtagatgcccccaaatctcaggacctcgccaagatcatggcagacatccgggcccaatatgacgagctggctcggaagaaccgagaggagctagacaagtactggtctcagcagattgaggagagcaccacagtggtcaccacacagtctgctgaggttggagctgctgagacgacgctcacagagctgagacgtacagtccagtccttggagatcgacctggactccatgagaaatctgaaggccagcttggagaacagcctgagggaggtggaggcccgctacgccctacagatggagcagctcaacgggatcctgctgcaccttgagtcagagctggcacagacccgggcagagggacagcgccaggcccaggagtatgaggccctgctgaacatcaaggtcaagctggaggctgagatcgccacctaccgccgcctgctggaagatggcgaggactttaatcttggtgatgccttggacagcagcaactccatgcaaaccatccaaaagaccaccacccgccggatagtggatggcaaagtggtgtctgagaccaatgacaccaaagttctgaggcattaagccagcagaagcagggtaccctttggggagcaggaggccaataaaaagttcagagttcat

SEQ ID NO: 66 - DNA, 739 bp, Homo sapien
cccaaagaaagcttggctatttttattgatgtgtaatatacaacctatgtaaatgaagttaggcctattggtttgcaaatgcagctttaacataattaccttacctgtctccttcccctacccaatgctgagggacattgctccccacctcaccatcatgccatgctttctccccctggtcataggtgatctttccagaacagctaaccaggtgcctggggtctggagaccttactgcttgaggagtgaattaagagaaaagactgcttgctttcctccagactttgagccctggcctgatgtagacctttttgctctctcctccttcgtataggtacggttcctggagcagcagaacaagatgctggagaccaagtggagcctcctgcagcagcagaagacggctcgaagcaacatggacaacatgttcgagagctacatcaacaaccttaggcggcagctggagactctgggccaggagaagctgaagctggaggcggagcttggcaacatgcaggggctggtggaggacttcaagaacaaaagtgagcaactcccaccctccacccaactgaagtcaccgtgctctcctccaccccttgggaccttgggactaagtccccatggccctctgttgtgggcagtgcagtcctatctaattagggtgaccacctgatgaggtttgctcggaacagtctgtgtttatgcccaggttcctagcacaattgttgatagtacc

SEQ ID NO: 67 - DNA, 3444 bp, Homo sapien
attggaagcgcactgcgcggcctccaccgcgctctcggcccgggttcggcgtgggggcggggaggtaagtacggtaatgggcggggccgagcgcgggcgcgctccggctttcctcctgcgcagtgctcccgtcagcgcagggggcggggcgcctatattacgtgcgcggcgccgctcctgcgagaggacgttgcgtgctcgctcgcgccaggcgagtctccgcgtctccctcgcgaactcggtgaaaggaattggcgccgttcgacaccaggcggatccgctctgcagcacgaacccatctccagccgcagccgcagccgccgcccgggccgaggagccgcctcggaagacgagaacggcgacgatcagggtttccaggaaggggaagatgagctcggggacgaagaggaaggcgcgggcgacgagaacgggcacggggagcagcagcctcaaccgccggcgacgcagcagcaacagccccaacagcagcgcggggccgccaaggaggccgcggggaagagcagcggccccacctcgctgttcgcggtgacggtggcgccgcccggggcgaggcagggccagcagcaggcgggaggggacggcaaaacagaacagaaaggcggagataaaaagaggggtgttaaaagaccacgagaagatcatggccgtggatattttgagtacattgaagagaacaagtatagcagagccaaatctcctcagccacctgttgaagaagaagatgaacacttcgatgacacagtggtttgtcttgatacttataattgtgatctacattttaaaatatcaagagatcgtctcagtgcttcttcccttacaatggagagttttgcttttctttgggctggaggaagagcatcctatggtgtgtcaaaaggcaaagtgtgttttgagatgaaggttacagagaagatcccagtaaggcatttatatacaaaagatattgacatacatgaagttcgtattggctggtcactaactacaagtggaatgttacttggtgaagaagaattttcttatgggtattctctaaaaggaataaaaacatgcaactgtgagactgaagattatggagaaaagtttgatgaaaatgatgtgattacatgttttgctaactttgaaagtgatgaagtagaactctcgtatgctaagaatggacaagatcttggcgttgccttcaaaatcagtaaggaagttcttgctggacggccactgttcccgcatgttctctgccacaactgtgcagttgaatttaattttggtcagaaggaaaagccatattttccaatacctgaagagtatactttcatccagaacgtccccttagaggatcgagttagaggaccaaaggggcctgaagagaagaaagattgtgaagttgtgatgatgattggcttgccaggagctggaaaaactacctgggttactaaacatgcagcagaaaatccagggaaatataacattcttggcacaaatactattatggataagatgatggtggcaggttttaagaagcaaatggcagatactggaaaactgaacacactgttgcagagagccccccagtgtcttgggaaatttattgagattgctgcccgaaagaagcgaaattttattctggatcagacaaatgtgtctgctgctgcccagaggagaaaaatgtgcctgtttgcaggcttccagcgaaaagctgttgtagtttgcccaaaagatgaagactataagcaaagaacacagaagaaagcagaagtagaggggaaagacctaccagaacatgcggtcctcaaaatgaaaggaaactttaccctcccagaggtagctgagtgctttgatgaaataacctatgttgaacttcagaaggaagaagcccaaaaactcttggagcaatataaggaagaaagcaaaaaggctcttccaccagaaaagaaacagaacactggctcaaagaaaagcaataaaaataagagtggcaagaaccagtttaacagaggtggtggccatagaggacgtggaggattcaatatgcgtggtggaaatttcagaggaggagcccctgggaatcgtggcggatataataggaggggcaacatgccacagagaggtggtggcggtggaggaagtggtggaatcggctatccataccctcgtgcccctgtttttcctggccgtggtagttactcaaacagagggaactacaacagaggtggaatgcccaacagagggaactacaaccagaacttcagaggacgaggaaacaatcgtggctacaaaaatcaatctcagggctacaaccagtggcagcagggtcaattctggggtcagaagccatggagtcagcattatcaccaaggatattattgaatacccaaataaaacgaactgatacatatttctccaaaaccttcacaagaagtcgactgttttctttagtaggctaactttttaaacattccacaagaggaagtgcctgcgggttccttttttagaagctttgtgggttgattttttttcttttcttttttgtacatttttaattgcagtttaaaagtgaatcgtaagagaacctcagcattgtgcacgataagagaatgtgtcagtatttcagggttctacattttatctgtaaaatgtgacttttttttttttttatcacaacagaagtaaaatgttgctttgtacctggtgtcttttattaagaatttactccccccatttctcacagagaataacagtcgggagtcattgtcacaatataatagaaatgttagcaaccagattcatgtaaggactaagtggtcctcatgaattgcattaagactctgtactgctcatattacactccatcctctctgtagtttgctgggtagtggagggggtaagctaaatcatagtttctgacaataactgggaaggttttttcttaaaataacaatggaattggtataattgggattgaaaactaaaacttggaactaagatagagaagatggagtgtatgtagaagggctgttaaaaatgtaaaacttggttgcattatttgtggaggctcaaacttgtgaaggttaataccataatttttccatttgttctgcattttgattctgaaaagaaagctggctttgcccatttcttattaaaaaaacttgttgtaaatccagttgtctaatgggatctatatgaagttagccatgtctgtatgcccttctcccacaaaatactgtataactagtgtgcttgtagtagttaactccaccatctttgtaagctaatgaaattgtgagtcacccatttatatcttaatttttaatcatgtcagttcttgaatgggtatctccttagcctgctgatttctttttctttctaaagaaagtgggtggagaaattaatttagacgtttgtttgcaataaaaagaattcatttta

SEQ ID NO: 68 - DNA, 2081 bp, Homo sapien
gagtatatatatatgtactccaagttcaataaggaaattttaaaaggcactcatcagcatagtgctagttgtaattaaagcaggcatactggcatatagggcctttaatattacaggaattaagatgatcctaacgtgttttgtactggtcgaagcttatccttaggtgacaggttctagagtctataaagataatttagtaattttcactttttgactcatgggatttacaagaatatttaaagggcttagaaagtaaagacttgcgaagaaaagctttagcaggagagattgttcaatatagaagagaaaaatatcccagtgaattcctgaaggaaggtatggcatatttaatagcagccctgatttaaaatagtgggaattaggtgatcctgtagatccttccaactttatgatttttagagattttatttttgcccaagtcatcagtaagtatgaggacattttttttgtgtttttccaagtgggttgtttaaaattttttcctttttttattcctcttcccaaggcaaatgaaaaaaaagttgaccagcctccagaagctaaaaagcccaaaataaaggtggtgaatgttgagctgcctattgaagccaacttggtctggcagttagggaaagaccttcttaacatgtatattgagacagagggtaagatgataatgcaagataaattggaaaaagaaaggaatgatgctaaaaatgcagttgaggaatatgtgtatgagttcagagacaagctgtgtggaccatatgaaaaatttatatgtgagcaggatcatcaaaattttttgagactcctcacagaaactgaagactggctgtatgaagaaggagaggaccaagctaaacaagcatatgttgacaagttggaagaattaatgaaaattggcactccagttaaagttcggtttcaggaagctgaagaacggccaaaaatgtttgaagaactaggacagaggctgcagcattatgccaagatagcagctgacttcagaaataaggatgagaaatacaaccatattgatgagtctgaaatgaaaaaagtggagaagtctgttaatgaagtgatggaatggatgaataatgtcatgaatgctcaggctaaaaagagtcttgatcaggatccagttgtacgtgctcaggaaattaaaacaaaaatcaaggaattgaacaacacatgtgaacccgttgtaacacaaccgaaaccaaaaattgaatcacccaaactggaaagaactccaaatggcccaaatattgataaaaaggaagaagatttagaagacaaaaacaattttggtgctgaacctccacatcagaatggtgaatgttaccctaatgagaaaaattctgttaatatggacttggactagataaccttaaattggcctattccttcaattaataaaatatttttgccatagtatgtgactctacataacatactgaaactatttatattttcttttttaaggatatttagaaattttgtgtattatatggaaaaagaaaaaaagcttaagtctgtagtctttatgatcctaaaagggaaaattgccttggtaactttcagattcctgtggaattgtgaattcatactaagctttctgtgcagtctcaccatttgcatcactgaggatgaaactgacttttgtcttttggagaaaaaaaactgtactgcttgttcaagagggctgtgattaaaatctttaagcatttgttcctgccaaggtagttttcttgcattttgctctccattcagcatgtgtgtgggtgtggatgtttataaacaagactaagtctgacttcataagggctttctaaaaccatttctgtccaagagaaaatgactttttgctttgatattaaaaattcaatgagtaaaacaaaagctagtcaaatgtgttagcagcatgcagaacaaaaactttaaactttctctctcactatacagtatattgtcatgtgaaagtgtggaatggaagaaatgtcgatcctgttgtaactgattgtgaacacttttatgagctttaaaataaagttcatcttatggtgtcatttcta

SEQ ID NO: 69 - DNA, 845 bp, Homo sapien
ccgcaaaaagcaaagcagaaagccaaacaagacccaaccaacttgggttattcattcgattcaaaactgtttttggttaaatcaaacatgaaagtacaaaaccgcaggaacgcgcatcttagctcatttgatcgcttcgccttccttgggaaatgcagtttcgtgtcacctgttgcagaagatatgtagttgatcatctagacataattgctgaagatgaacttttggaccaacttctaagtcacacagcatcattatcagatttattacagaactcggtggtggccactgcgcagaccagacttcgctcgtactcgtgcgcctcgcttcgcttttcctccgcaaccatgtctgacaaacccgatatggctgagatcgagaaattcgataagtcgaaactgaagaagacagagacgcaagagaaaaatccactgccttccaaagaaacgattgaacaggagaagcaagcaggcgaatcgtaatgaggcgtgcgccgccaatatgcactgtacattccacaagcattgccttcttattttacttcttttagctgtttaactttgtaagatgcaaagaggttggatcaagtttaaatgactgtgctgcccctttcacatcaaagaactactgacaacgaaggccgcgcctgcctttcccatctgtctatctatctggctggcagggaaggaaagaacttgcatgttggtgaaggaagaagtggggtggaagaagtggggtgggacgacagtgaaatctagaagtgccatttttttttttgttcaaatgattttaattattggaatgcacaatttttttaatatgcaaataaaaagtttaaaaactta

SEQ ID NO: 70 - DNA, 853 bp, Homo sapien
tctccgcctgccgagctccgacccggcgttccgagtccccggcgcccggaggtgacggtcgcttcccctgccctcccttagggttagtcccgcccaatcggctccttaatttttcggaggggcttctactttggcatttatcacgggctgtctgcctcacttacgaagcagggtgcccctagcacactgccgggcccctgggggaacgcacttagggaagcgaagcaaagctaactgcatttggcagaaaccagcgcgctttcccacggcgccacgggagcgcaccgctagacagagaaggcactagaagaggcggtcggtgcatagcgtcacctcctaaactccgcccatcggaagcgccttctaagctcgttcttccgccagcttccctcctcttcctttctccgccatcgtggtgtgttcttgactccgctgctcgccatgtcttctcacaagactttcaggattaagcgattcctggccaagaaacaaaagcaaaatcgtcccattccccagtggattcggatgaaaactggaaataaaatcagctcttgaagatgatgtgtctcggagtttgttccttcagatgttcagatatgtccagagtttcttccttccagtgggttcgtggtctcactgacttcaggaatgaagctgcatacgctcacgctccacagaaaagttctccaagtccccactcgacccaggaagtcctgctgtcttcacctgtcaccagctactggggaggctgaggcaggagaatcgcttgaacccaggaggtggaggttgctgggagccaagccaagatcacgccactacactccagcctggcaacagagtgagactccgtctc

SEQ ID NO: 71 - DNA, 853 bp, Homo sapien
tacggctaggtacgaggctgggtgttgctcctctcccagtcggcaccacagcggtggctgccgggcgtggtgtcggtgggtcggttggtttttgtctcaccgttggtgtccgtgccgttcagttgcccgccatggctgagctggatccgttcggcgcccctgccggcgcccctggcggtcccgcgctggggaacggagtggccggcgccggcgaagaagacccggctgcggccttcttggcgcagcaagagagcgagattgcgggcatcgagaacgacgaggccttcgccatcctggacggcggcgcccccgggccccagccgcacggcgagccgccggggggtccggatgctgttgatggagtaatgaatggtgaatactaccaggaaagtaatggtccaacagacagttatgcagctatttcacaagtggatcgattgcagtcagagcctgaaagtatccgtaaatggagagaagaacaaatggaacgcttggaagcccttgatgccaattctcggaagcaagaagcagagtggaaagaaaaggcaataaaggagctagaagaatggtatgcaagacaggacgagcagctacagaaaacaaaagcaaacaacagggcagcagaagaagcctttgtaaatgacattgacgagtcgtccccaggcactgagtgggaacgggtggcccggctgtgtgactttaaccccaagtctagcaagcaggccaaagatgtctcccgcatgcgctcagtcctcatctccctcaagcaggccgctggtgctggaggccccgtggacctcctggttttaccccggggcctccgctgggttttgggttggcccttgttggcttt

SEQ ID NO: 72 - DNA, 1666 bp, Homo sapien
ctagttctagatcgcgggcggccgctcgcgatctagaaccggacgcgtggggcgcttgtcctcctctcccagtcggcaccacagcggtggctgccgggcgtggtgtcggtgggtcggttggtttttgtctcaccgttggtgtccgtgccgttcagttgcccgccatggctgagctggatccgttcggcgcccctgccggcgcccctggcggtcccgcgctggggaacggagtggccggcgccggcgaagaagacccggctgcggccttcttggcgcagcaagagagcgagattgcgggcatcgagaacgacgaggccttcgccatcctggacggcggcgcccccgggccccagccgcacggcgagccgccggggggtccggatgcaggaaagtaatggtccaacagacagttatgcagctatttcacaagtggatcgattgcagtcagagcctgaaagtatccgtaaatggagagaagaacaaatggaacgcttggaagcccttgatgccaattctcggaagcaagaagcagagtggaaagaaaaggcaataaaggagctagaagaatggtatgcaagacaggacgagcagctacagaaaacaaaagcaaacaacagggcagcagaagaagcctttgtaaatgacattgacgagtcgtccccaggcactgagtgggaacgggtggcccggctgtgtgactttaaccccaagtctagcaagcaggccaaagatgtctcccgcatgcgctcagtcctcatctccctcaagcaggccccgctggtgcactgaagagccaccctgtggaaacactacatctgcaatatcttaatcctactcagtgaagctcttcacagtcattggattaattatgttgagttcttttggaccaaacctttttgtctttagagttgttcattgtttgtgattgcatgtttccttccttcaactgtgttctccctggcattcagagaggagggagaggaggaagaggaaggggagggaagcttcccaagagtagcctcaacctgtgcttctgtgcattattctgagaataaatttctgtttcaaactgtaaaaaaaaaaaaaaacacaaaacacaacacacaaaaacacaaaaacacaaaaaaaaaaacaaacaacacacaaaacaaacacacaacacacaccacacacaaacaaaaaacaaacacaaagagggggggggcgcatatatatataataaccaccccgcgggaggggcacaatattatcatcacacacaacaccacaatattatgagaaaaaaaggcgcccccaattaagagaggggtgtatataataaaaaaagagaagagggcccacttttaatatacacaaccggctaagagcggagaagaaacaaacacacgcttgtccgccaggagaactcttttggtggaaagacacccaccccatctctcctgcgggggaggcaaacaaatcaatgtggaccaacaccacacccctccagaagaggagattataaccccccccctccacggagggatcatcaacaacaccaacacagtgagagagatcataagggtggacacaaaaaccgcgaccatacaatcagctgatgaggagctgaaaaaaaatcattgtcatcacaccgggcgttcaattctaaaaaaaaattatatagaga

SEQ ID NO: 73 - DNA, 1542 bp, Homo sapien
ctagttctagatcgcgggcggccgctcgcgatctagaaccggacgcgtggggcgcttgtcctcctctcccagtcggcaccacagcggtggctgccgggcgtggtgtcggtgggtcggttggtttttgtctcaccgttggtgtccgtgccgttcagttgcccgccatggctgagctggatccgttcggcgcccctgccggcgcccctggcggtcccgcgctggggaacggagtggccggcgccggcgaagaagacccggctgcggccttcttggcgcagcaagagagcgagattgcgggcatcgagaacgacgaggccttcgccatcctggacggcggcgcccccgggccccagccgcacggcgagccgccggggggtccggatgccaattctcggaagcaagaagcagagtggaaagaaaaggcaataaaggagctagaagaatggtatgcaagacaggacgagcagctacagaaaacaaaagcaaacaacagggcagcagaagaagcctttgtaaatgacattgacgagtcgtccccaggcactgagtgggaacgggtggcccggctgtgtgactttaaccccaagtctagcaagcaggccaaagatgtctcccgcatgcgctcagtcctcatctccctcaagcaggccccgctggtgcactgaagagccaccctgtggaaacactacatctgcaatatcttaatcctactcagtgaagctcttcacagtcattggattaattatgttgagttcttttggaccaaacctttttgtctttagagttgttcattgtttgtgattgcatgtttccttccttcaactgtgttctccctggcattcagagaggagggagaggaggaagaggaaggggagggaagcttcccaagagtagcctcaacctgtgcttctgtgcattattctgagaataaatttctgtttcaaactgtaaaaaaaaaaaaaaacacaaaacacaacacacaaaaacacaaaaacacaaaaaaaaaaacaaacaacacacaaaacaaacacacaacacacaccacacacaaacaaaaaacaaacacaaagagggggggggcgcatatatatataataaccaccccgcgggaggggcacaatattatcatcacacacaacaccacaatattatgagaaaaaaaggcgcccccaattaagagaggggtgtatataataaaaaaagagaagagggcccacttttaatatacacaaccggctaagagcggagaagaaacaaacacacgcttgtccgccaggagaactcttttggtggaaagacacccaccccatctctcctgcgggggaggcaaacaaatcaatgtggaccaacaccacacccctccagaagaggagattataaccccccccctccacggagggatcatcaacaacaccaacacagtgagagagatcataagggtggacacaaaaaccgcgaccatacaatcagctgatgaggagctgaaaaaaaatcattgtcatcacaccgggcgttcaattctaaaaaaaaattatatagaga

SEQ ID NO: 74 - DNA, 1958 bp, Homo sapien
gcagacggggtgggtaggacgctccctatcaggcagcacttccgcctcccggggcccgcgcagctcacctccctcacctcccgccctaccccagtcacgagttgttttagggggaccgcccctccacttgctgattgggtagctcctgaaccattgttgtcctctgattggttgttcccttttcggctctgcaacaccgcctagaccgaccggatacacgggtagggcttccgctttacccgtctccctcctggcgcttgtcctcctctcccagtcggcaccacagcggtggctgccgggcgtggtgtcggtgggtcggttggtttttgtctcaccgttggtgtccgtgccgttcagttgcccgccatggctgagctggatccgttcggcgcccctgccggcgcccctggcggtcccgcgctggggaacggagtggccggcgccggcgaagaagacccggctgcggccttcttggcgcagcaagagagcgagattgcgggcatcgagaacgacgaggccttcgccatcctggacggcggcgcccccgggccccagccgcacggcgagccgccggggggtccggatgctgttgatggagtaatgaatggtgaatactaccaggaaagtaatggtccaacagacagttatgcagctatttcacaagtggatcgattgcagtcagagcctgaaagtatccgtaaatggagagaagaacaaatggaacgcttggaagcccttgatgccaattctcggaagcaagaagcagagtggaaagaaaaggcaataaaggagctagaagaatggtatgcaagacaggacgagcagctacagaaaacaaaagcaaacaacagggtggcagatgaagctttctacaaacaacccttcgctgacgtgattggttatgtgcagggcagcagaagaagcctttgtaaatgacattgacgagtcgtccccaggcactgagtgggaacgggtggcccggctgtgtgactttaaccccaagtctagcaagcaggccaaagatgtctcccgcatgcgctcagtcctcatctccctcaagcaggccccgctggtgcactgaagagccaccctgtggaaacactacatctgcaatatcttaatcctactcagtgaagctcttcacagtcattggattaattatgttgagttcttttggaccaaacctttttgtctttagagttgttcattgtttgtgattgcatgtttccttccttcaactgtgttctccctggcattcagagaggagggagaggaggaagaggaaggggagggaagcttcccaagagtagcctcaacctgtgcttctgtgcattattctgagaataaatttctgtttcaaactgtaaaaaaaaaaaaaaacacaaaacacaacacacaaaaacacaaaaacacaaaaaaaaaaacaaacaacacacaaaacaaacacacaacacacaccacacacaaacaaaaaacaaacacaaagagggggggggcgcatatatatataataaccaccccgcgggaggggcacaatattatcatcacacacaacaccacaatattatgagaaaaaaaggcgcccccaattaagagaggggtgtatataataaaaaaagagaagagggcccacttttaatatacacaaccggctaagagcggagaagaaacaaacacacgcttgtccgccaggagaactcttttggtggaaagacacccaccccatctctcctgcgggggaggcaaacaaatcaatgtggaccaacaccacacccctccagaagaggagattataaccccccccctccacggagggatcatcaacaacaccaacacagtgagagagatcataagggtggacacaaaaaccgcgaccatacaatcagctgatgaggagctgaaaaaaaatcattgtcatcacaccgggcgttcaattctaaaaaaaaattatatagaga

SEQ ID NO: 75 - DNA, 1233 bp, Homo sapien
  misc_feature (1232)..(1232): n=a, c, g or t
gcagacggggtgggtaggacgctccctatcaggcagcacttccgcctcccggggcccgcgcagctcacctccctcacctcccgccctaccccagtcacgagttgttttagggggaccgcccctccacttgctgattgggtagctcctgaaccattgttgtcctctgattggttgttcccttttcggctctgcaacaccgcctagaccgaccggatacacgggtagggcttccgctttacccgtctccctcctggcgcttgtcctcctctcccagtcggcaccacagcggtggctgccgggcgtggtgtcggtgggtcggttggtttttgtctcaccgttggtgtccgtgccgttcagttgcccgccatggctgagctggatccgttcggcgcccctgccggcgcccctggcggtcccgcgctggggaacggagtggccggcgccggcgaagaagacccggctgcggccttcttggcgcagcaagagagcgagattgcgggcatcgagaacgacgaggccttcgccatcctggacggcggcgcccccgggccccagccgcacggcgagccgccggggggtccggatgctgttgatggagtaatgaatggtgaatactaccaggaaagtaatggtccaacagacagttatgcagctatttcacaagtggatcgattgcagtcagagcctgaaagtatccgtaaatggagagaagaacaaatggaacgcttggaagcccttgatgccaattctcggaagcaagaagcagagtggaaagaaaaggcaataaaggagctagaagaatggtatgcaagacaggacgagcagctacagaaaacaaaagcaaacaacagggcagcagaagaagcctttgtaaatgacattgacgagtcgtccccaggcactgagtgggaacgggtggcccggctgtgtgactttaaccccaagtctagcaagcaggccaaagatgtctcccgcatgcgctcagtcctcatctccctcaagcaggcccgkkggtgatgarragcacctgtggaamactaatttgatatttatctatcagggaagtttaagcatgatatatgttgaggttttggagaacctttgttcgagtgtcttgttggtggggttctctaagggttccggtaagagggggagaaagggggcaaaacgttggtttaaatttgggagaaaaaaaaagggtttggggtgttttgtggggttgaaatttatcna

SEQ ID NO: 76 - DNA, 1262 bp, Homo sapien
  misc_feature (1262)..(1262): n=a, c, g or t
gcagacggggtgggtaggacgctccctatcaggcagcacttccgcctcccggggcccgcgcagctcacctccctcacctcccgccctaccccagtcacgagttgttttagggggaccgcccctccacttgctgattgggtagctcctgaaccattgttgtcctctgattggttgttcccttttcggctctgcaacaccgcctagaccgaccggatacacgggtagggcttccgctttacccgtctccctcctggcgcttgtcctcctctcccagtcggcaccacagcggtggctgccgggcgtggtgtcggtgggtcggttggtttttgtctcaccgttggtgtccgtgccgttcagttgcccgccatggctgagctggatccgttcggcgcccctgccggcgcccctggcggtcccgcgctggggaacggagtggccggcgccggcgaagaagacccggctgcggccttcttggcgcagcaagagagcgagattgcgggcatcgagaacgacgaggccttcgccatcctggacggcggcgcccccgggccccagccgcacggcgagccgccggggggtccggatgctgttgatggagtaatgaatggtgaatactaccaggaaagtaatggtccaacagacagttatgcagctatttcacaagtggatcgattgcagtcagagcctgaaagtatccgtaaatggagagaagaacaaatggaacgcttggaagcccttgatgccaattctcggaagcaagaagcagagtggaaagaaaaggcaataaaggagctagaagaatggtatgcaagacaggacgagcagctacagaaaacaaaagcaaacaacagggcagcagaagaagcctttgtaaatgacattgacgagtcgtccccaggcactgagtgggaacgggtggcccggctgtgtgactttaaccccaagtctagcaagcgggcaagatgtttcccgatggctcagtctcattcctcaaggaggcccgtgtgcctgagagccctgtggaacctacattgatatttatctatcagtgagtctcaagtcatgttattatgttgagttctttggccaaccttttgttttagagtgtctggttgggatgctggtcctctcaaggtttccggctcagaggggggggagggagggggggcccagavccccggtgggtttgaaattgtgggaaaaaacgtttkggrrgakgggtgtccttttgcttagccttttatgggccggatctataaccn

SEQ ID NO: 77 - DNA, 1451 bp, Homo sapien
agctcaccctggtcagcctagcactctgacctagcagtcaacatgaaggctctcattgttctggggcttgtcctcctttctgttacggtccagggcaaggtctttgaaaggtgtgagttggccagaactctgaaaagattgggaatggatggctacaggggaatcagcctagcaaactggatgtgtttggccaaatgggagagtggttacaacacacgagctacaaactacaatgctggagacagaagcactgattatgggatatttcagatcaatagccgctactggtgtaatgatggcaaaaccccaggagcagttaatgcctgtcatttatcctgcagtgctttgctgcaagataacatcgctgatgctgtagcttgtgcaaagagggttgtccgtgatccacaaggcattagagcatgggtggcatggagaaatcgttgtctttccttcttcagctcattttgtctctctcacattaagggagtaggaattaagtgaaaggtcacactaccattatttccccttcaaacaaataatatttttacagaagcaggagcaaaatatggcctttcttctaagagatataatgttcactaatgtggttattttatattaagcctacaacatttttcagtttgcaaatagaactaatactggtgaaaatttacctaaaaccttggttatcaaatacatctccagtacattccgttctttttttttttgagacagtctcgctctgtcgcccaggctggagtgcagtggcgcaatctcggctcactgcaacctccacctcccgggttcacgccattctcctgcctcagcctcccgagtagctgggattacgggcgcccgccaccacgcccggctaattttttgtatttttagtagagacagggtttcaccgtgttagccaggatggtctcgatctcctgaccttgtgatccacccacctcggcctcccaaagtgctgggattacaggcgtgagccactgcgcccggccacattcagttcttatcaaagaaataacccagacttaatcttgaatgatacgattatgcccaatattaagtaaaaaatataagaaaaggttatcttaaatagatcttaggcaaaataccagctgatgaaggcatctgatgccttcatctgttcagtcatctccaaaaacagtaaaaataaccactttttgttgggcaatatgaaatttttaaaggagtagaataccaaatgatagaaacagactgcctgaattgagaattttgatttcttaaagtgtgtttctttctaaattgctgttccttaatttgattaatttaattcatgtattatgattaaatctgaggcagatgagcttacaagtattgaaataattactaattaatcacaaatgtgaagttatgcatgatgtaaaaaatacaaacattctaattaaaggctttgcaacaca

SEQ ID NO: 78 - DNA, 1259 bp, Homo sapien
gtctgagggaggggcctggactccgggctctgagcctactggggcacaggcctgtgagttgaggccccttctcatcatccccctcctcaggtggtctacatagcctgctccttcaccacggtctggttgatttatagcaagttcaaagctacttacgatgggaaccatgacacgttcagagtggagttcctggtcgttcccacagccattctggcgttcctggtcaatcatgacttcacccctctggagatcctctggaccttctccatctacctggagtcagtggccatcttgccgcagctgttcatggtgagcaagaccggcgaggcggagaccatcaccagccactacttgtttgcgctaggcgtttaccgcacgctctatctcttcaactggatctggcgctaccatttcgagggcttcttcgacctcatcgccattgtggcaggcctggtccagacagtcctctactgcgatttcttctacctctatatcaccaaagtcctaaaggggaagaagttgagtttgccggcatagccccggtcctctccatctctctcctcggcagcagcgggaggcagaggaaggcggcagaagatgaagagctttcccatccaggggtgacttttttaagaacccacctcttgtgctccccatcccgcctcctgccgggtttcagggggacagtggaggatccaggtcttggggagctcaggacttgggctgtttgtagttttttgccttttagacaagaaaaaaaaatctttccactctttagtttttgattctgatgactcgtttttcttctactctgtggccccaatttttataaagtgtttttgagtgtcctatgggccggggcagggtccaagatcttttcccttccccaggcccctcggctccctcccagatcccacccccagccccactggttgccaaacactaaatctgccgacacccatctgccccacctcctgccatggccatgaaccgcgacccccactaaatttctagattggggatagggagaaagggaggcccaggaaggtctcccctgattttttttcatagtaatttttttccccagagtttgaattttttggtcttctcctggttttttggcaaattaggggggcccggggctcaagtgcgggaagggggctggcccgaggatcccatggctctcacaccatgtttttgtacagaactgatggttgaatctttgttctcttgaaataaacagaagaaaatgaaacctt

SEQ ID NO: 79 - DNA, 3882 bp, Homo sapien
gaattcgtgggtcgtgctgcgtcgacaacggtagtgacgcgtattgcctggaggatggcggacgccggcattcgccgcgtggttcccagcgacctgtatcccctcgtgctcggcttcctgcgcgataaccaactctcagaggtggccaataagttcgccaaagcgacaggagctacacagcaggatgccaatgcctcttccctcttagacatctatagcttctggctcaacaggtctgccaaggtcccagagcgaaagttacaggcaaatggaccagtggctaagaaagctaagaagaaggcctcatccagtgacagtgaggacagcagcgaggaggaggaggaagttcaagggcctccagcaaagaaggctgctgtacctgccaagcgagtcggtctgcctcctgggaaggctgcagccaaagcatcagagagtagcagcagtgaagagtccagtgatgatgatgatgaggaggaccaaaagaaacagcctgtccagaagggagttaagccccaagccaaggcagccaaagctcctcctaagaaggccaagagctctgattctgattctgactcaagctccgaggatgagccaccaaagaaccagaagccaaagataacacctgtgacagttaaagctcagactaaagcccctcccaaaccagctcgagcagcacctaaaatagccaatggtaaagcagccagtagcagcagtagcagcagcagcagcagtagcagtgatgactcagaggaggagaaggcagcagccacccccaagaaggtctggaccataacttctgtcagggcagaggtgaccagggtgtgatgtgtgtgtgtcttccttccctggcaggattggttgggtcagcattttcctgtggtaatcaattttctttctaatgcagactgtacctaaaaagcaagttgtggccaaggccccagtgaaagcagctaccacccctacccggaagagttctagcagtgaggattcctccagtgacgaggaagaggagcaaaaaaaacccatgaaaaataaaccaggtccctacagttcagtccccccgccttctgctcccccaccaaagaagtctctgggaacccagcctcccaagaaggctgtggagaagcagcagcctgtggaaagcagtgaagacagcagtgatgagtctgattcaagttctgaagaagagaagaaacccccaactaaggcagtagtctctaaagcaaccactaaaccacctccagcaaagaaagcagcagagagctcttcagacagctcagactctgacagctctgaggatgatgaagctccttctaagccagctggtaccaccaagaattcttcaaataagccagctgtcaccaccaagtcacctgcagtgaagccagctgcagcccccaagcaacctgtgggcggtggccagaagcttctgacgagaaaggctgacagcagctccagtgaggaagagagcagctccagtgaggaggagaagacaaagaagatggtggccaccactaagcccaaggcgactgccaaagcagctctatctctgcctgccaagcaggctcctcagggtagtagggacagcagctctgattcagacagctccagcagtgaggaggaggaagagaagacatctaagtctgcagttaagaagaagccacagaaggtagcaggaggtgcagccccttccaagccagcctctgcaaagaaaggaaaggctgagagcagcaacagttcttcttctgatgactccagtgaggaagaggaagagaagctcaagggcaagggctctccaagaccacaagcccccaaggccaatggcacctctgcactgactgcccagaatggaaaagcagctaagaacagtgaggaggaggaagaagaaaagaaaaaggcggcagtggtagtttccaaatcaggttcattaaagaagcggaagcagaatgaggctgccaaggaggcagagactcctcaggccaagaagataaagcttcagacccctaacacatttccaaaaaggaagaaaggagaaaaaagggcatcatccccattccgaagggtcagggaggaggaaattgaggtggattcacgagttgcggacaactcctttgatgccaagcgaggtgcagccggagactggggagagcgagccaatcaggttttgaagttcaccaaaggcaagtcctttcggcatgagaaaaccaagaagaagcggggcagctaccggggaggctcaatctctgtccaggtcaattctattaagtttgacagcgagtgacctgaggccatcttcggtgaagcaagggtgatgatcggagactacttactttctccagtggacctgggaaccctcaggtctctaggtgagggtcttgatgaggacagaagtttagagtaggtcctaagactttacagtgtaacatcctctctggtccttttctgtgttcctagttttgtacagacttgtttttgagtgttgagtagcagggacaaaataagggaatgttattttttaagaaaattcattttcattgttgtctccttccttttctgtgaaagtcctcatactgagaaatttgtatattttatattaaatcacttactattgatttttgttgtgattttcaaaggtggattcccacagataaaatcttggctattgcccaaaacatagtaaagggtcacgtgtgactttttataataggaagaaaattctgcctttgtgagtgcacatgtccacatttcatccctccttccctcaaaaccctagagaggggcattaaagaattgttgatgtatatgcaatgtctgttaagcatgcactatgtatttcatcctcatttattgggtctgggactgaagtttttagccagcatggacctaacctactttttgggataaaattctctgttttgttacaggcaaaattctggtatggcgtgaatgccatgggtcattctgaatatatttttttctgtaattttatcattacacgatgtttgcaatacgtgctttgttttttaatttgaaagcaaacttttctactgttgaaagacattttttgacaacttgacccttcctagtattgagttctaagttgaggactgcatcttctcgttttttacagtatagagaacaaaatgacatgagtttgaaaaatacatatcacttggtattgctgtcttggttgcagtggtgatacagaattggtttcattaattcctacatggttgagaatcactgatcaagaaagtggggggaaaaaaaacaaacgttaaaacctcaatcctcagtaggaaggtagattacattaggtgaaattataggtaatctatgtatgtgctaatggggttggaaagaaccttacagagcatattacctgataaactggagtgggtttgggagaacaaactaataggattattgtgtctcctagttggtacctgggagcaattgacatgcccccttcagaaccttaactgttagtagcagtggctgtaacaacacaaaccagtgaccagagataacagcttttaggccaagctggcctgacggtatggctgcaggaagtgactgagcagtagcggtactcagccagaccaagacggagagggaagagtccacagctttctggaagctaaggcattctggtggtagaaaagtgtgccccaagccttcatggacgagttataggtcttaagattagtctcctcttgtttggattccatacttgctaaataacctgataataacctggttttccatgtaactgcctctaggaagaaaatgtactgttcatgctgacacagatatttcagtctgcatggtaaaagttctaaatcttactacaaaataataaactggctggtttataatgtg

SEQ ID NO: 80 - DNA, 2467 bp, Homo sapien
ctcagtggccacctccttctcaagcaaagtgggcccacgcagccagagaggacagccttcctgagtaatcctcagcccctgattttgcaaacctgaagcactatcaaaaacagcagagtcttccaagtttatgcagcacttctgacccagacacacctcttggggccccgagcagctctgattcagacagctccagcagtgaggaggaggaagagaagacatctaagtctgcagttaagaagaagccacagaaggtagcaggaggtgcagccccttccaagccagcctctgcaaagaaaggaaaggctgagagcagcaacagttcttcttctgatgactccagtgaggaagaggaagagaagctcaagggcaagggctctccaagaccacaagcccccaaggccaatggcacctctgcactgactgcccagaatggaaaagcagctaagaacagtgaggaggaggaagaagaaaagaaaaaggcggcagtggtagtttccaaatcaggttcattaaagaagcggaagcagaatgaggctgccaaggaggcagagactcctcaggccaagaagataaagcttcagacccctaacacatttccaaaaaggaagaaaggagaaaaaagggcatcatccccattccgaagggtcagggaggaggaaattgaggtggattcacgagttgcggacaactcctttgatgccaagcgaggtgcagccggagactggggagagcgagccaatcaggttttgaagttcaccaaaggcaagtcctttcggcatgagaaaaccaagaagaagcggggcagctaccggggaggctcaatctctgtccaggtcaattctattaagtttgacagcgagtgacctgaggccatcttcggtgaagcaagggtgatgatcggagactacttactttctccagtggacctgggaaccctcaggtctctaggtgagggtcttgatgaggacagaagtttagagtaggtcctaagactttacagtgtaacatcctctctggtccttttctgtgttcctagttttgtacagacttgtttttgagtgttgagtagcagggacaaaataagggaatgttattttttaagaaaattcattttcattgttgtctccttccttttctgtgaaagtcctcatactgagaaatttgtatattttatattaaatcacttactattgatttttgttgtgattttcaaaggtggattcccacagataaaatcttggctattgcccaaaacatagtaaagggtcacgtgtgactttttataataggaagaaaattctgcctttgtgagtgcacatgtccacatttcatccctccttccctcaaaaccctagagaggggcattaaagaattgttgatgtatatgcaatgtctgttaagcatgcactatgtatttcatcctcatttattgggtctgggactgaagtttttagccagcatggacctaacctactttttgggataaaattctctgttttgttacaggcaaaattctggtatggcgtgaatgccatgggtcattctgaatatatttttttctgtaattttatcattacacgatgtttgcaatacgtgctttgttttttaatttgaaagcaaacttttctactgttgaaagacattttttgacaacttgacccttcctagtattgagttctaagttgaggactgcatcttctcgttttttacagtatagagaacaaaatgacatgagtttgaaaaatacatatcacttggtattgctgtcttggttgcagtggtgatacagaattggtttcattaattcctacatggttgagaatcactgatcaagaaagtggggggaaaaaaaacaaacgttaaaacctcaatcctcagtaggaaggtagattacattaggtgaaattataggtaatctatgtatgtgctaatggggttggaaagaaccttacagagcatattacctgataaactggagtgggtttgggagaacaaactaataggattattgtgtctcctagttggtacctgggagcaattgacatgcccccttcagaaccttaactgttagtagcagtggctgtaacaacacaaaccagtgaccagagataacagcttttaggccaagctggcctgacggtatggctgcaggaagtgactgagcagtagcggtactcagccagaccaagacggagagggaagagtccacagctttctggaagctaaggcattctggtggtagaaaagtgtgccccaagccttcatggacgagttataggtcttaagattagtctcctcttgtttggattccatacttgctaaataacctgataataacctggttttccatgtaactgcctctaggaagaaaatgtactgttcatgctgacacagatatttcagtctgcatggtaaaagttctaaatcttactacaaaataataaactggctggtttataatgtg

SEQ ID NO: 81 - DNA, 7144 bp, Homo sapien
gcgctcgggccaatgagagataggctcatggcgcggctgtagctggaactgaccaataggagggcgggctgggggcggaggcccaggttccaaacgctccgcggcgccatgggctgaaaactcaaccgagatggaatctcccagtctgaaccggtttcaaccggttccgagtttgaggcactaggaggagggggagaagcggctgcagcggccgcggcaggagcagcgggagctacagcatcagcaagagcaacagtagctacagccccggcggcggtgcctgttccagtctttgctgctgcagtccgtgcaaccacccagagggggaggggggaaccaccagtcgctgaggaacaagagaaggggggaaagtttaggcgagccttggggggggggggccagcgccggagccgcgtgagagagggagccgtgttttggtaggggggagtcggactgcaactggcagcagagcgtctccccggccgtgtggactctacacctcctactcctgccgcttctgctgctgcctgtggctggagggtccccctggggctgaatctttgggacttgaccccgttccctcccccttccctcactccccagccgggcgggagcatttattccccagattaattccccttttgggggggggcgggtgtgtgtgtgtgtgtgtgtgtgtgtgtgtgtgttgggggaagcgtccctgaaatagtaaatattattgagctctttttgcccttttcctgtccgtttttttaatttccttttttgaggtgggaaaactgaaacccaccttgattcgtcccctctcccccctccccaccttccctcgccctaatcccccaacgaggaaggaaggagcagttggttcaatctctggtaatctatgccagcaattatgacaatgttagcagaccatgcagctcgtcagctgcttgatttcagccaaaaactggatatcaacttattagataatgtggtgaattgcttataccatggagaaggagcccagcaaagaatggctcaagaagtactgacacatttaaaggagcatcctgatgcttggacaagagtcgacacaattttggaattttctcagaatatgaatacgaaagtaagcaagtggtggttttaaaatctgttatttcttttcttccagtcataaactttgaggaaggtatctcatttttagtattagcatttgttatctcaaattattttatattgttaatttgtttcaaaatttagtcttaagcatataattaattcttgcaaatagtcctaagaattatgaatgaagttttgtaatgggactagtatgcaaggtggcttttttggttgtctgattttgtttttttctttttagtatatgtatacaggtctaagtagcataaattctgaatgttattcagagattaaacataacattaaggaattattttgggcaagtaatcaatataatacaggccaggcacctctgacaccaagttgtgtggacagcttaaaaccctactccatggcattgggcttctaatgggacagcactcagtttttatttacaatggaaaatgttataattctggtccttttttaagtttgaacagaagggttgatcaaaatgtgttttgtctgttttaggcttgatgattcacgcttctctttaaactgccttaaagtaataaatactatggcattctgtttaatacacgaaaggtttccacttgatatacattgtgttaaaacagaagatagccatattcacatctgtttctgaaaccagactttgttaattaacagttttaaaatattaattagttttgacatcttgtaaattttaggtcaaaaatacagtccagaacttcctcaaagtgctaaccttaagtaacataacagtgtttgcctgtttgcttgcctggtaaattttgctttttatactgacagacattactaatgtttaagttgatttatcaacagtatttttaaaaactcaaatttgtcttgtgaaaaatgagatgattagaggaacagaaagaaagcaacaggtaaagaattcttcaatttacataaattacaaatgatttggtgctaaatttatgcactatgacatttggcttttatgcaatcatttttttttctttaaagatgttaacactacctgatattaatcataatgttccattatgttgattgcttgtaataggaagaaaaggggtgtcttcctgtgcaactgacacagctaggctttgacggcaggcctccacaagtactatggactacaaattttggaaaatgtgataaaaacaaggtggaagattcttccaaggaaccagtgcgaaggaataaaaaaatacgttgttggcctcattatcaagacgtcatctgacccaacttgtgtagagaaagaaaaggtgtatatcggaaaattaaatatgatccttgttcagatactgaaacaagaatggcccaaacattggccaacttttatcagtgatattgttggagcaagtaggaccagcgaaagtctctgtcaaaataatatggtgattcttaaactcttgagtgaagaagtatttgatttctctagtggacagataacccaagtcaaatctaagcatttaaaagacagcatgtgcaatgaattctcacagatatttcaactgtgtcagtttgtaatggaaaattctcaaaatgctccacttgtacatgcaaccttggaaacattgctcagatttctgaactggattcccctgggatatatttttgagaccaaattaatcagcacattgatttataagttcctgaatgttccaatgtttcgaaatgtctctctgaagtgcctcactgagattgctggtgtgagtgtaagccaatatgaagaacaatttgtaacactatttactctgacaatgatgcaactaaagcagatgcttcctttaaataccaatattcgacttgcgtactcaaatggaaaagatgatgaacagaacttcattcaaaatctcagtttgtttctctgcacctttcttaaggaacatgatcaacttatagaaaaaagattaaatctcagggaaactcttatggaggcccttcattatatgttgttggtatctgaagtagaagaaactgaaatctttaaaatttgtcttgaatactggaatcatttggctgctgaactctatagagagagtccattctctacatctgcctctccgttgctttctggaagtcaacattttgatgttcctcccaggagacagctatatttgcccatgttattcaaggtaacagagcggttggttgagtgttcttcctgttgcatactgtggttttgaggtctgaatccaaatacttctaatctgtgtaaataaattagctataaaaagagaacccaacaacttctccatgagtgtggaaaactagaacatgaaaggagttgagtctagaaccttgattctcaagagtgtggtccttctctcagtatcaacattggttgtgatttcgttaggcaaattcattggccacctgccaatctactaaaccagagtctaggaatgagacacaggaaactcctgtaacagaagttggttaaaaaaatcacattaaaacacacttaaataattataaagccatttttgtagaattacagtgaaaaaaaattttttcttttggagacagggtcttgctctgtggctcaggttggagtgcagtggcgtggtcatagctcactacaatcttgaactcctagactaaagcaattctcttgtgtcagcctcccaagtaattggttgcaggcacacaccaccatgcctagcaaattttaaattttttagttttacttcatttatatttacatagttttttctgttgtgctttaagccccagtatttttattgttttagagattgggtgtcattttgtgttgctcaagctgctctcaaattcctggccacaacagttctttttgcctcggccctccggaatagttggaattataggcatgaatccctacacatggctggcttgtggtttttttggttttgtttgtttttaactaagcttctacactaatgatttcagtgatctaacgatttttttcttgattgatatattgttgagtataggtccgtttattaatggttagtcgaatggctaaaccagaggaagtattggttgtagagaatgatcaaggagaagttgtgagagaattcatgaaggatacagattccataaatttgtataagaatatgagggaaacattgggtaagttaataaatactgttaatctttacctttataaatctattctggggtggaaatacattttaggaaatgtacttgtagtttctaaatattttctaaatgtattgttactcatcaataaaattctgctcattatttgcatttgaaaccatgtttttctttgtagtttatcttactcatctggattatgtagatacagaaagaataatgacagagaagcttcacaatcaagtgaatggtacagagtggtcatggaaaaatttgaatacattgtgttgggcaataggctccattagtggagcaatgcatgaagaggacgaaaaacgatttcttgttactgttataaaggatctattaggattatgtgaacagaaaagaggcaaagataataaagctattattgcatcaaatatcatgtacatagtaggtcaatacccacgttttttgagagctcactggaaatttctgaagactgtagttaacaagctgttcgaattcatgcatgagacccatgatggagtccaggatatggcttgtgatactttcattaaaatagcccaaaaatgccgcaggcatttcgttcaggttcaggttggagaagtgatgccatttattgatgaaattttgaacaacattaacactattatttgtgatcttcagcctcaacaggttcatacgttttatgaagctgtggggtacatgattggtgcacaaacagatcaaacagtacaagaacacttgatagaaaagtacatgttactccctaatcaagtgtgggatagtataatccagcaggcaaccaaaaatgtggatatactgaaagatcctgaaacagtcaagcagcttggtagcattttgaaaacaaatgtgagagcctgcaaagctgttggacacccctttgtaattcagcttggaagaatttatttagatatgcttaatgtatacaagtgcctcagtgaaaatatttctgcagctatccaagctaatggtgaaatggttacaaagcaaccattgattagaagtatgcgaactgtaaaaagggaaactttaaagttaatatctggttgggtgagccgatccaatgatccacagatggtcgctgaaaattttgttccccctctgttggatgcagttctcattgattatcagagaaatgtcccagctgctagagaaccagaagtgcttagtactatggccataattgtcaacaagttagggggacatataacagctgaaatacctcaaatatttgatgctgtttttgaatgcacattgaatatgataaataaggactttgaagaatatcctgaacatagaacgaactttttcttactacttcaggctgtcaattctcattgtttcccagcattccttgctattccacctacacagtttaaacttgttttggattccatcatttgggctttcaaacatactatgaggaatgtcgcagatacgggcttacagatactttttacactcttacaaaatgttgcacaagaagaagctgcagctcagagtttttatcaaacttatttttgtgatattctccagcatatcttttctgttgtgacagacacttcacatactgctggtttaacaatgcatgcatcaattcttgcatatatgtttaatttggttgaagaaggaaaaataagtacatcattaaatcctggaaatccagttaacaaccaaatctttcttcaggaatatgtggctaatctccttaagtcggccttccctcacctacaagatgctcaagtaaagctctttgtgacagggcttttcagcttaaatcaagatattcctgctttcaaggaacatttaagagatttcctagttcaaataaaggaatttgcaggtgaagacacttctgatttgtttttggaagagagagaaatagccctacggcaggctgatgaagagaaacataaacgtcaaatgtctgtccctggcatctttaatccacatgagattccagaagaaatgtgtgattaaaatccaaattcatgctgttttttttctctgcaactcgttagcagaggaaaacagcatgtgggtatttgtcgaccaaaatgatgccaatttgtaaattaaaatgtcacctagtggccctttttcttatgtgtttttttgtataagaaattttctgtgaaatatccttccattgtttaagcttttgttttggtcatctttatttagtttgcatgaagttgaaaattaaggcatttttaaaaattttacttcatgcccatttttgtggctgggctggggggaggaggcaaattcgatttgaacatatacttgtaattctaatgcaaaattatacaatttttcctgtaaacaataccaatttttaattagggagcattttccttctagtctatttcagcctagaagaaaagataatgagtaaaacaaattgcgttgtttaaaggattatagtgctgcattgtctgaagttagcacctcttggactgaatcgtttgtctagactacatgtattacaaagtctctttggcaagattgcagcaagatcatgtgcatatcatcccattgtaaagcgacttcaaaaatatgggaacacagttagttatttttacacagttctttttgtttttgtgtgtgtgtgctgtcgcttgtcgacaacagctttttgttttcctcaatgaggagtgttgctcatttgtgagccttcattaactcgaagtgaaatggttaaaaatatttatcctgttagaataggctgcatctttttaacaactcattaaaaaacaaaacaactctggcttttgagatgacttatactaatttacattgtttaccaagctgtagtgctttaagaacactacttaaaaagcaaaataaacttggtttacattta

SEQ ID NO: 82 - DNA, 1001 bp, Homo sapien
gtgcccgatcgcagcaactattccggcagctatcattgcttttgacgataaatcgtgtccctccagtacaatcatagagatatgtagctgcactaccttacgcatttccagatccccgatcgcatctctactgtccgtcgctttacattgctgctgtccttcctgcttagacgcctggtgactctcatttcgcagcaggccacgctgctggcctccaatgaagcctttaaaaagcaggcggagagtgctagtgaggcggccaagaagtacatggaggagaatgaccagctcaagaagggagctgctgttgacggaggcaagttggatgtcgggaatgctgaggtgaagttggaggaagagaacaggagcctgaaggctgacctgcagaagctaaaggacgagctggccagcactaagcaaaaactagagaaagctgaaaaccaggttctggccatgcggaagcagtctgagggcctcaccaaggagtacgaccgcttgctggaggagcacgcaaagctgcaggctgcagtagatggtcccatggacaagaaggaagagtaagggcctccttcctcccctgcctgcagctggcttccacctggcacgtgcctgctgcttcctgagagcccggcctctccctccagtacttctgtttgtgcccttctgcttcccccattcccttccacagctcatagctcgtcatctcggcccttgtccacactctccaagcacattacaggggacctgattgctacacgttcagaatgcgtttgctgtcatcctgcttggcctggccaggcctggcacagccttggcttccacgcctgagcgtggagagcacgagttagttgtagtccggcttgcggtggggctgacttcctgttggtttgagcccctttttgttttgccctctgggtgttttctttggtcccgcaggagggtgggtggagcaggtggactggagtttctcttgagggcaataaaagttgtcatggtgtgta

SEQ ID NO: 83 - DNA, 2419 bp, Homo sapien
gccatggatcccaactgctcctgcgccgccggtaagaggctggggatgcccagtgtagactgtagcgctagagaagcaatttctgacccctctttctttctctggtcactcaatttcaggacaggagttgctccttcccaaagagttttggggtatctttctctccattctaggttattcggagccccctttttaccgttaaggagatctgagttaatggcttgctcaagttcccaggaatcggttgtggactgaggaactcggccccgggctcttagtacctgcccgggcggtcgggcggggccggggctgctgtgggagagttcggttgctgcggcggggcctgcacgttgactgtgggaaactcggtgagcgggctccgcgcgccgggctgggctccgggaccgcggaggctccccggcccatcgacgagggagagaggcgagcggcgcggggaggcccgggggccggggaatctcggggcccgcagcctacctgcgtgtgagaggcaggggcgaggggaaaccgggcggcgcctctagaagctggtctcgggggcggggcggggggcggtgaagccccacctggaggagcggccgggatgggcctccgggacggtgtgccaggccggggccaagtcggaggcccctcgctctgggtgggcgctggggcccgcgagggctactgtaaggacccctggcttctgaggatactgcgtctagaactttctccgtatggggccttgaggtgcttggtcgagacctgcctttgcgcttggtcccgaatcctgccctctaggagtcgctcttgcgggcctccagcccaccggaggcgaagcggccccgggcggaaggccgctggatcctcgagggaggtgccggtttctctccgcgggcgccgtggggacggtgggaggcgggggcgtcggcagcgcttggactaggtgcggccttgggcctgcctggtagcggggatttgggcccgcagagcgcccgcctctgcggctgagttctgcctggcggggaagggagcgcccgatgggtgccgaggcgtcctcctcttggtgccctggcactgctcttcccgaagaacgcctttcagttaaacgggcgtcggaaatctcgggcttcctggggcagggatcgtcgggagaggccgctctggacgtgttgacacacgtgctggagggggcaggaaacaagctcacatcttcctgtgggaaaccttctagcaacaggatgagtctgcagtggactgcagttgccaccttcctctatgcggaggtctttgttgtgttgcttctctgcattcccttcatttctcctaaaagatggcagaagattttcaagtcccggctggtggagttgttagtgtcctatggcaacaccttctttgtggttctcattgtcatccttgtgctgttggtcatcgatgccgtgcgcgaaattcggaagtatgatgatgtgacggaaaaggtgaacctccagaacaatcccggggccatggagcacttccacatgaagcttttccgtgcccagaggaatctctacattgctggcttttccttgctgctgtccttcctgcttagacgcctggtgactctcatttcgcagcaggccacgctgctggcctccaatgaagcctttaaaaagcaggcggagagtgctagtgaggcggccaagaagtacatggaggagaatgaccagctcaagaagggagctgctgttgacggaggcaagttggatgtcgggaatgctgaggtgaagttggaggaagagaacaggagcctgaaggctgacctgcagaagctaaaggacgagctggccagcactaagcaaaaactagagaaagctgaaaaccaggttctggccatgcggaagcagtctgagggcctcaccaaggagtacgaccgcttgctggaggagcacgcaaagctgcaggctgcagtagatggtcccatggacaagaaggaagagtaagggcctccttcctcccctgcctgcagctggcttccacctggcacgtgcctgctgcttcctgagagcccggcctctccctccagtacttctgtttgtgcccttctgcttcccccattcccttccacagctcatagctcgtcatctcggcccttgtccacactctccaagcacattacaggggacctgattgctacacgttcagaatgcgtttgctgtcatcctgcttggcctggccaggcctggcacagccttggcttccacgcctgagcgtggagagcacgagttagttgtagtccggcttgcggtggggctgacttcctgttggtttgagcccctttttgttttgccctctgggtgttttctttggtcccgcaggagggtgggtggagcaggtggactggagtttctcttgagggcaataaaagttgtcatggtgtgta

SEQ ID NO: 84 - DNA, 1487 bp, Homo sapien
tctcgcccctcggcggggcccctcccgcaccacagagacgtgggacggccgcgcggactagagaagcggccctcgccggcccgacaaagccccgccccgccccgcccgcgtgctcgctccaccccgccctgctcgcccggagcccgaggcgcctcttcctctcccgctcggagcgccggccctccgctccggggcggggtgggaagcggaggtgggcggagcctccggggcctcgcgagggctggtgggcggtgcccggcgggcgcttccggtttccggccgcggtatgaggggcggggccggggctgctgtgggagagttcggttgctgcggcggggcctgcacgttgactgtgggaaactcggaaacaagctcacatcttcctgtgggaaaccttctagcaacaggatgagtctgcagtggactgcagttgccaccttcctctatgcggaggtctttgttgtgttgcttctctgcattcccttcatttctcctaaaagatggcagaagattttcaagtcccggctggtggagttgttagtgtcctatggcaacaccttctttgtggttctcattgtcatccttgtgctgttggtcatcgatgccgtgcgcgaaattcggaagtatgatgatgtgacggaaaaggtgaacctccagaacaatcccggggccatggagcacttccacatgaagcttttccgtgcccagaggaatctctacattgctggcttttccttgctgctgtccttcctgcttagacgcctggtgactctcatttcgcagcaggccacgctgctggcctccaatgaagcctttaaaaagcaggcggagagtgctagtgaggcggccaagaagtacatggaggagaatgaccagctcaagaagggagctgctgttgacggaggcaagttggatgtcgggaatgctgaggtgaagttggaggaagagaacaggagcctgaaggctgacctgcagaagctaaaggacgagctggccagcactaagcaaaaactagagaaagctgaaaaccaggttctggccatgcggaagcagtctgagggcctcaccaaggagtacgaccgcttgctggaggagcacgcaaagctgcagagcccggcctctccctccagtacttctgtttgtgcccttctgcttcccccattcccttccacagctcatagctcgtcatctcggcccttgtccacactctccaagcacattacaggggacctgattgctacacgttcagaatgcgtttgctgtcatcctgcttggcctggccaggcctggcacagccttggcttccacgcctgagcgtggagagcacgagttagttgtagtccggcttgcggtggggctgacttcctgttggtttgagcccctttttgttttgccctctgggtgttttctttggtcccgcaggagggtgggtggagcaggtggactggagtttctcttgagggcaataaaagttgtcatggtgtgta

SEQ ID NO: 85 - DNA, 1656 bp, Homo sapien
  misc_feature (7)..(7): n=a, c, g or t
  misc_feature (14)..(14): n=a, c, g or t
  misc_feature (76)..(76): n=a, c, g or t
  misc_feature (88)..(88): n=a, c, g or t
  misc_feature (204)..(204): n=a, c, g or t
  misc_feature (220)..(220): n=a, c, g or t
  misc_feature (385)..(385): n=a, c, g or t
  misc_feature (548)..(548): n=a, c, g or t
tgattcnttccccnttttcctacaccccccccttccccccgaccggaggagccgctctttccgcgcggggcattcnggggcccgaggncgagcccgccgccgccgccgtcgcccgagggaagcgagaagaggccgcgaccggagagaaaaagcggagtcgccaccggagagaagtcgacacccaagcagcagccgccgccaganaggcccgcccaccagnccgcccgtccccccgccccgtccacaaagcagcccgcctccgcaaaggggtacgaacgaagggacaaagtctccaatgaaaaaagtgtagaagacagaaaggaagtaaaagaaaaaaaagaaaaaaccaaacaaacaatcagttgtcccggaggaagtgaaaaanaaaagcattaaaaagaaaaagaacattaacacagaattgaaccaaaagaatccaagcaaaaaagaacggacagaacaaattaaagggggaaacgaaaaggagaaaccggccaggcaaggccaagggaaacaaaagaaagggcaaagccaaaaaggccaagggncgacatcaaaaaagggaaagacwgggaagawgawtcagatgaagacatgtctaattttgatcgtttctctgagatgatgaacaacatgggtggtgatgaggatgtagatttaccagaagtagatggagcagatgatgattcacaagacagtgatgatgaaaaaatgccagatctggagtaaggaatattgtcatcacctggattttgagaaagaaaaataacttctctgcaagatttcataattgagagaattcctgagttgatagctctaaaggcagatatgctgtatttgcctactttaacccatttttcaacctgtttgttttttaaaaggcttcactaagggttgatatgtaccattgtatggggcaattttaagtcagctaaaggcaataacctttattgcatgaaacatttcccccagactttttcatgaaagcttgttgagggttccctaggggcacaattcaattgcagccaggtttgcggaattaaaatttaaaaaaccatttcttcaaaccttaaaggttccttcccttttccttttccatttaaaccctttaggaattacttggaccttggatttcgggagaaggcatcctctccaggcatcttaagggccgcacaggacacgcacactctcacttttttaggaaatcttcattctggaaccaccttgggtttttccccaacaaggttggctcctgggggaccccaactgttggggtgtgttgacgacacccctttttagctgggcgtgaacaccgtgggggaaaagtctcctcccgcgaggggtgctgatcccctttctccggggtagtgggggtttcccccgcttttgaaacagtcttcctcttgtcttcttcccacaagagaccattcttttccctgtctctgcccactgtgttagtcctcctcttgtgggggtccgcggggggtcggtgagcgtgcgtgctcccggtggggtgttccccgacggggggcgtcttctttacgggctcgtacacctcgctcgagggaaatgtgtgcgcccttaaacgtttctggacggaggggggcttgggaggaaagcctttttctacacacgggggggtctctctgttgggac

SEQ ID NO: 86 - DNA, 1448 bp, Homo sapien
caaatggacatgtctcttgactggacatcattaaactgaaccggagccagcgaggcggctggggcgggtgccggggcctgcgtgccgtgtgccggctcccagttgcggsccgcggyggtggggcgcagccgccgragtgaatcgaggcggcggcccatccggaaccggccgkscatcgcccgcggcgccgggakkgcggcaggaaccgaccggcgccctacagcaggccaaaacaacttcccgacaagtggcagcacgatcttttcgacagtggcttcggcggtggtgccggcgtggagacaggtgggaaaccgtgcgtggtgtccatctggatwttggagtctcagacgccgatattcaggaactctttgctgaatttggaacgctgaagaaggcggctgtgcactatgatcgctctggtcgcagcttaggaacagcagacgtgcactttgagcggaaggcagatgccctgaaggccatgaagcagtacaacggcgtccctctggatggccgccccatgaacattcagcttgtcacgtcacagattgacgcacagcggaggcctgcacagagcgtaaacagaggtggcatgactagaaaccgtggcgctggaggtattggtggtgatggaggcacccggagaggcaatgctcgtatcttgtgtggaagaggcagaggtgccggcaggaattcaaagcagcagctttcggcagaggagctggatgcccagctggacgcctataatgcgagaatggacaccagttaaacagacyrgcrwatctygtgyggaacaggacccaggcgtctcctcttgctccctggtaaggcggggcgtggtggctgtggctgtgcggccaatgatggatttgtttctttgatgttattaaaatatggatttaagaaactcatgtaacaggttcttctctatttatttgcttctaatatattttttatagcttctcgaaacccacacctgtgttggttgaccccgagtgttccttattgtcgggcgattcaacacttgtacacctgggtagtgcgagtgatggttgcgtgagcacaaactgggcgcgcgcgcgtatcgcccgacgcattaatcgcccacatcagtattataactacttaggaacatacggtcgtgtcatagacacatttgtggggaacaattataaccatataggatctaggagacacaaccagggtgggcgcgcgcgccaggagctagatagaaattagatctccccggacagtagcggggacgaccaggcacctgtgcacgacgagagtacgccgaaggttcttgtaattggtgaaaagtacatacaagttatggggcgccaataggtaatagagtgggagtcgcagatagaatatgtagaaggcccaagcgagcgggatgcgaggcgcggggtgtatgaatgcttcacccaagggtcgtaggtttagtg

SEQ ID NO: 87 - DNA, 1594 bp, Homo sapien
tggcgtgggtaagaccagcattgctcgctccatcagcccgcgccctgaacacgagagtacattccagcttcagcgtcgggggcatgacatgacagtggctgagatcaagggcacaacaggcaggacactacgtgggcagccatgcccagggaagatcatccaagtgtttgaagaagaccaagacggagaaccccactgatcctcatcagacgaggtggacaagatcaggccagaggctacacagggggacccagtcagtcaggcaacatgcatggagcatgcatggacccaagagcaagaatgccaaacattccatggaccaacatacacatggacagtgccacgtggacattgtcacaaggtgcatgttcatctgcacggccaacgtcacggacaccatccccgagccgctgcgagaccgtatggagatgatcaacgtgtcgggctaagtggsccaggagaagctggccattgcggagcrgctaactggtgccccrggymtcgcgcccwtgtgtggcwttggatgagagcaaggccaagctgtcatcggacgtgctgacgctgctcatcaagcagtactgccgcgagagcggtgtccgcaacctgcagaagcaagtggagaaggtgttacggaaatcggcctacaagattgtcagcggcgaggccgagtccgtggaggtgacgcccgagaacctgcaggacttcgtggggaagcccgtgttcaccgtggagcgcatgtatgacgtgacaccgcccggcgtggtcatggggctggcctggaccgcaatgggaggctccacgctgtttgtggagacatccctgagacggccacaggacaaggatgccaagggtgacaaggatggcagcctggaggtgacaggccagctgggggaggtgatgaaggagagcgcccgcatagcctacaccttcgccagagccttcctcatgcagcacgcccccgccaatgactacctggtgacctcacacatccacctgcatgtgcccgagggcgccacccccaaggacggcccaagcgcaggctgcaccatcgtcacggccctgctgtccctggccatgggcaggcctgtccggcagaatctggccatgactggcgaagtctccctcacgggcaagatcctgcctgttggtggcatcaaggagaagaccattgcggccaagcgcgcaggggtgacgtgcatcgtcctgccagccgagaacaagaaggacttctacgacctggcagccttcatcaccgagggcctggaggtgcacttcgtggaacactaccgggagatcttcgacatcgccttcccggacgagcaggcagaggcgctggccgtggaacggtgacggccaccccgggactgcaggcggcggatgtcaggccctgtctgggccagaactggatgtcaggccctgtctgggccagaactgagcgctgtggggagcgcgcccggacctggcagtggagccaccgagcgagcagctcggtccagtgacccagatcccagggacctcagtcggcttaatcagagtgtggcatagaagctatttaatgattaaagtcatttgcagtaacacacacaaccacaaa

SEQ ID NO: 88 - DNA, 991 bp, Homo sapien
cgccttctgtgtccgggtggacatgtctctggcaattctagaagaggtaataatgtgggatcctagggtgtcccggccgtgcctcccattggggatgtggccacccagtactttgctgacagggacatgttctgtgctggccgagtacctgaggaggatctgaagaggacaatgatggcctgtggaggctcaatccagaccagtgtgaatgctctgtcagcagatgtgcttggtcgatgccagttgtttgaagagacccagattggaagcgagaggtacaatcttttgactgctgccccargccaagacatgcaccttcattctccgtggcggcaccgagcagtttatggaggagacagagcggtccctgcatgatgccatcatgatcgtcakgagggccatcaagaatgattcagtggtrgctggtggcggggccattragatggaactctccaagtacctgcgggattactcaaggactattccaggaaaacagcagctgttgattggggcttatgccaaggccttggagattatcccacgccagctgtgtgacaatgctggctttgatgccacaaacattctcaacaagctgcgggctcggcatgcccaggggggtacatggtatggagtagacatcaacaacgaggacattgctgacaactttgaagctttcgtgtgggagccagctatggtgcggatcaatgcgctgacagcagcctctgaggctgcagtgcctgatcgtgtcttgtagatgaaaccatcaagaacctcdccgtctcgactgtggatgctcccacatgcatgcaggaccggggtctgtggtctgtggccgcccccatctgagaggcaccccacccatcacatggctggctggctgctgggtgcacttaccctccttggcttggttacttcattttacaaggaaggggtagtaattggcccactctcttcttactggaggctatttaaataaaaggtaagacttcca

SEQ ID NO: 89 - DNA, 944 bp, Homo sapien
  misc_feature (26)..(26): n=a, c, g or t
  misc_feature (185)..(185): n=a, c, g or t
  misc_feature (189)..(189): n=a, c, g or t
  misc_feature (197)..(197): n=a, c, g or t
  misc_feature (206)..(206): n=a, c, g or t
  misc_feature (216)..(216): n=a, c, g or t
  misc_feature (228)..(228): n=a, c, g or t
  misc_feature (231)..(231): n=a, c, g or t
  misc_feature (233)..(233): n=a, c, g or t
  misc_feature (241)..(241): n=a, c, g or t
  misc_feature (246)..(248): n=a, c, g or t
  misc_feature (260)..(260): n=a, c, g or t
  misc_feature (274)..(276): n=a, c, g or t
  misc_feature (279)..(280): n=a, c, g or t
  misc_feature (288)..(288): n=a, c, g or t
  misc_feature (296)..(296): n=a, c, g or t
  misc_feature (302)..(302): n=a, c, g or t
  misc_feature (310)..(310): n=a, c, g or t
  misc_feature (318)..(318): n=a, c, g or t
  misc_feature (341)..(341): n=a, c, g or t
  misc_feature (343)..(343): n=a, c, g or t
  misc_feature (350)..(350): n=a, c, g or t
  misc_feature (363)..(363): n=a, c, g or t
  misc_feature (378)..(378): n=a, c, g or t
  misc_feature (404)..(406): n=a, c, g or t
  misc_feature (411)..(411): n=a, c, g or t
  misc_feature (418)..(418): n=a, c, g or t
  misc_feature (433)..(433): n=a, c, g or t
  misc_feature (436)..(436): n=a, c, g or t
  misc_feature (478)..(478): n=a, c, g or t
  misc_feature (484)..(484): n=a, c, g or t
  misc_feature (505)..(505): n=a, c, g or t
  misc_feature (511)..(511): n=a, c, g or t
  misc_feature (516)..(516): n=a, c, g or t
  misc_feature (529)..(529): n=a, c, g or t
  misc_feature (854)..(854): n=a, c, g or t
  misc_feature (926)..(926): n=a, c, g or t
  misc_feature (270)..(270): n=a, c, g or t
gtcacccttttcctgcacaacaacgnggtcttccatgatccccacatcgctgactcctggccgcagctccaggaccacttctcagctgtgragtcgtggggccggaggaggctctgagcccaggcgaggccagggacatggccatggacctgtgtcggcaggaccccgagtgtgagttctacttnagcntggacgcngacgctgtnctcaccaacntgcagaccctgngtntnctcattgnggagnnnaggggggtgatngctcccatgntgtnnnggnngggcaagntgtggtcnaacttntggggcgncctgagcnccgatgagtactacgcccgctcngnggactangtggagctggtgnagcggaagcgatgtnggtgtgtggaatgttccatatatctnnnaggcntatgtgntggggggtgataccntgnggatggagctgccccagagggatgtgttctcgggcagtgacncagacncggacatggccttctgttagngctttngaganaagggcatcttcntccatctgagctatcagcatgaatttggccggctcctggccacttccagatacgacacggagcacctgcaccccgacctctggcagatcttcgacaaccccgtcgactggaaggagcagtacatccacgagaactacagccgggccctggaagggaaggaatcgtggagcagccatgcccggacgtgtactggttcccactgctgtcagaacaaatgtgtgatgagctggtggcagagatggagcactacggccagtggtcaggcggccggcatgaggattcaaggctggctggaggctacgagaatgtgcccaccgtggacatnccacatgaagcaggtggggtacgaggaccagtggctgcagctgctgcggacgtatgtgggcccatgaccganacctgtttccggtttaca

SEQ ID NO: 90 - DNA, 973 bp, Homo sapien
  misc_feature (1)..(1): n=a, c, g or t
naagcatagtctaggtacsmsgctkrtgmtccccgccgctgcagccgtcgccttcggagcgaagggtaccgacccggcagaagctcggagctctcggggtatcgaggaggcaggcccgcgggcgcacgggcgagcgggccgggagccggagcggcggaggagccggcagcagcggcgcggcgggctccaggcgaggcgggctccaggcgaggcggtcgacgctcctgaaaacttgcgcgcgcgctcgcgccactgcgcccggagcgatgaagatggtcgcgccctggactcggttctactccaacagctgctgcttgtgctgccatgtccgcaccggcaccatcctgctcggcgtctggtatctgatcatcaatgctgtggtactgttgattttattgagtgccctggctgatccggatcagtataacttttcaagttctgaactgggaggtgactttgagttcatggatgatgccaacatgtgcattgccattgcgatttctcttctcatgatcctgatatgtgctatggctacttacggagcgtacaagcaacgcgcagcctggatcatcccattcttctgttaccagatctttgactttgccctgaacatgttggttgcaatcactgtgcttatttatccaaactccattcaggaatacatacggcaactgcctcctaattttccctacagagatgatgtcatgtcagtgaatcctacctgtttggtccttattattcttctgtttattagcattatcttgacttttaagggttacttgattagctgtgtttggaactgctaccgatacatcaatggtaggaactcctctgatgtcctggtttatgttaccagcaatgacactacggtgctgctacccccgtatgatgatgccactgtgaatggtgcttgccaaggagcaccggcacttacgtgttgcctaagccttcaagtgggcggacctgagggcag

SEQ ID NO: 91 - DNA, 287 bp, Homo sapien
aaggagcggatgtctaatatatggcctggctctagatgctccgagcggccgcagtgtgatggattcgagcggcgcccgggcaggtacggtctgcaccctacatgggattcatagaggccaccagaaaccaggccttttcttgtccagaagttccaacgcttcagcagcgatagccaccacttacagctcgtccccacacagtgctgccacagcaggctgacgcaggtcctccgcccgagcacctccagcgctgcacgtgcgcacttgcgtctggactgcacgatccg

SEQ ID NO: 92 - DNA, 235 bp, Homo sapien
gccagtgtgatggatgcgtggtcgcggcgaggtacggtctgcaccctacatgggattcatagaggccaccagaaaccaggccttttcttgtccagaagttccaacgcttcagcagcgatagccaccacttacagctcgtccccacacagtgctgccacagcaggctgacgcaggtcctccgcccgagcacctccagcgctgcacgtgcgcacttgcgtctggactgcacgatccg

SEQ ID NO: 93 - DNA, 797 bp, Homo sapien
  misc_feature (772)..(772): n=a, c, g or t
  misc_feature (785)..(786): n=a, c, g or t
  misc_feature (796)..(796): n=a, c, g or t
gccgacgagacctcagaaaaagaacagcaagaagcgattgaacacattgatgaagtacaaaatgaaatagacagacttaatgaacaagccagtgaggagattttgaaagtagaacagaaatataacaaactccgccaaccatttkttcagaagaggtcagaattgatcgccaaaatcccaacatttttggggtaacaacatttgtcaaccatccacaagatgtctgcactgctctgcgggaggaagatgaagaggcactgcattatttgaccagagttgaagtgacagaatttgaagatattaaatcaggttacagaatagagttttdattttgatggaaatccttactttgaaaataaagttctctccdaagaatttcatctgaatgagagtggtgatccatcttcgaagtccaccgaaatcaaatggaaatctggaaaggatttgacgaaacgttcgagtcaaacgcagaataaagccagcaggaagaggcagcatgaggaaccagagagcttctttacctggtttactgaccattctgatgcaggtgctgatgagttaggagaggtcatcaaagatgatatttggccaaacccattacagtactacttggttcccgatatggatgatgaagaaggagaaggagaagaagatgatgatgatgatgargaggaggaaggattagaagatattgcgaagaaggggatgaggatgaaggtkargaagatkaagatkatkatgwartgggaggaaggacaggaggattaaaganaaaatttctttannaacccccaanc

SEQ ID NO: 94 - DNA, 2068 bp, Homo sapien
agtccgccccgccccctccccgtccccgccgctgcagccgtcgccttcggagcgaagggtaccgacccggcagaagctcggagctctcggggtatcgaggaggcaggcccgcgggcgcacgggcgagcgggccgggagccggagcggcggaggagccggcagcagcggcgcggcgggctccaggcgaggcggtcgacgctcctgaaaacttgcgcgcgcgctcgcgccactgcgcccggagcgatgaagatggtcgcgccctggacgcggttctactccaacagctgctgcttgtgctgccatgtccgcaccggcaccatcctgctcggcgtctggtatctgatcatcaatgctgtggtactgttgattttattgagtgccctggctgatccggatcagtataacttttcaagttctgaactgggaggtgactttgagttcatggatgatgccaaaattctttttaatctttcggcagacatgtgcattgccattgcgatttctcttctcatgatcctgatatgtgctatggctacttacggagcgtacaagcaacgcgcagcctggatcatcccattcttctgttaccagatctttgactttgccctgaacatgttggttgcaatcactgtgcttatttatccaaactccattcaggaatacatacggcaactgcctcctaattttccctacagagatgatgtcatgtcagtgaatcctacctgtttggtccttattattcttctgtttattagcattatcttgacttttaagggttacttgattagctgtgtttggaactgctaccgatacatcaatggtaggaactcctctgatgtcctggtttatgttaccagcaatgacactacggtgctgctacccccgtatgatgatgccactgtgaatggtgctgccaaggagccaccgccaccttacgtgtctgcctaagccttcaagtgggcggagctgagggcagcagcttgactttgcagacatctgagcaatagttctgttatttcacttttgccatgagcctctctgagcttgtttgttgctgaaatgctactttttaaaatttagatgttagattgaaaactgtagttttcaacatatgctttgctagaacactgtgatagattaactgtagaattcttcctgtacgattggggatataacgggcttcactaaccttccctaggcattgaaacttcccccaaatctgatggacctagaagtctgcttttgtacctgctgggccccaaagttgggcatttttctctctgttccctctcttttgaaaatgtaaaataaaaccaaaaatagacaactttttcttcagccattccagcatagagaacaaaaccttatggaaacaggaatgtcaattgtgtaatcattgttctaattaggtaaatagaagtccttatgtatgtgttacaagaatttcccccacaacatcctttatgactgaagttcaatgacagtttgtgtttggtggtaaaggattttctccatggcctgaattaagaccattagaaagcaccaggccgtgggagcagtgaccatctgctgactgttcttgtggatcttgtgtccagggacatggggtgacatgcctcgtatgtgttagagggtggaatggatgtgtttggcgctgcatgggatctggtgcccctcttctcctggattcacatccccacccagggcccgcttttactaagtgttctgccctagattggttcaaggaggtcatccaactgactttatcaagtggaattgggatatatttgatatacttctgcctaacaacatggaaaagggttttcttttccctgcaagctacatcctactgctttgaacttccaagtatgtctagtcaccttttaaaatgtaaacattttcagaaaaatgaggattgccttccttgtatgcgctttttaccttgactacctgaattgcaagggatttttatatattcatatgttacaaagtcagcaactctcctgttggttcattattgaatgtgctgtaaattaagtcgtttgcaattaaaacaaggtttgcccca

SEQ ID NO: 95 - protein, 211 aa, Homo sapien
MASGQGPGPPRQECGEPALPSASEEQVAQDTEEVFRSYVFYRHQQEQEAEGVAAPADPEMVTLPLQPSSTMGQVGRQLAIIGDDINRRYDSEFQTMLQHLQPTAENAYEYFTKIATSLFESGINWGRVVALLGFGYRLALHVYQHGLTGFLGQVTRFVVDFMLHHCIARWIAQRGGWVSIQGLQCPPCCWGCPSPRPHPFLGFLYLLLASL

SEQ ID NO: 96 - protein, 225 aa, Homo sapien
EWHQLGPCGGSSGLRLPSGPTRLPAWPDWLPRPGDPLRGRLHAASLHCPVDCTEGWLGEYPRTAMSSLLLGLPLSQAPPLPRVPISSASLSVTTLFLPAGGSPELGQWSHPERAGGSGCGSVGPVCGTKILQIMTPKGALWGPGSDPCLDLSEVFAFSAPLQGSPLKSTEALASVHSSFGGPLRGGQSGCRGTSTLHGASGPSLWAQGLWPSPPSALWDLLSPVC

SEQ ID NO: 97 - protein, 284 aa, Homo sapien
MAPLHSSLGNKRNSISKKKKIYSCFLNLAERIRIPEPWITPPDLQEKIHIFAQKCLFLTESLKQFTEKMQSDMEKIQELREAQLYSVDVTLDPDTAYPSLILSDNLRQVRYSYLQQDLPDNPERFNLFPCVLGSPCFIAGRHYWEVEVGDKAKWTIGVCEDSVCRKGGVTSAPQNGFWAVSLWYGKEYWALTSPMTALPLRTPLQRVGIFLDYDAGEVSFYNVTERCHTFTFSHATFCGPVRPYFSLSYSGGKSAAPLIICPMSGIDGFSGHVGNHGHSMETSP

SEQ ID NO: 98 - protein, 321 aa, Homo sapien
KHKISWVWWRMPVIPATQEAEAGESLEPGRQRLRWAEMAPLHSSLGNKRNSISKKKKIYSCFLNLAERIRIPEPWITPPDLQEKIHIFAQKCLFLTESLKQFTEKMQSDMEKIQELREAQLYSVDVTLDPDTAYPSLILSDNLRQVRYSYLQQDLPDNPERFNLFPCVLGSPCFIAGRHYWEVEVGDKAKWTIGVCEDSVCRKGGVTSAPQNGFWAVSLWYGKEYWALTSPMTALPLRTPLQRVGIFLDYDAGEVSFYNVTERCHTFTFSHATFCGPVRPYFSLSYSGGKSAAPLIICPMSGIDGFSGHVGNHGHSMETSP

SEQ ID NO: 99 - protein, 50 aa, Homo sapien
TIYGPKVAKILRASVELLDEMKFSLEKLHQGITVSDPPFDTQPRPDDSFS

SEQ ID NO: 100 - protein, 121 aa, Homo sapien
SSRWRSCTKASQSQTLPLTPSPGPMTAFPEDPGHAAVPPHGQMDTQSLGGHCWHGVSARHLPPAPPDGPTRGCADVGTTEPRCTLDQGAGPASGRPPTNLFCPAEVVGGASWGARFPQLWV

SEQ ID NO: 101 - protein, 386 aa, Homo sapien
MFDTTPHSGRSTPSSSPSLRKRLQLLPPSRPPPEPEPGTMVEKGSDSSSEKGGVPGTPSTQSLGSRNFIRNSKKMQSWYSMLSPTYKQRNEDFRKLFSKLPEAERLIVDYSCALQREILLQGRLYLSENWICFYSNIFRWETTISIQLKEVTCLKKEKTAKLIPNAIQICTESEKHFFTSFGARDRCFLLIFRLWQNALLEKTLSPRELWHLVHQCYGSELGLTSEDEDYVSPLQLNGLGTPKEVGDVIALSDITSSGAADRSQEPSPVGSRRGHVTPNLSRASSDADHGAEEDKEEQVDSQPDASSSQTVTPVAEPPSTEPTQPDGPTTLGPLDLLPSEELLTDTSNSSSSTGEEGEAGGPNSFASGTCKPRSVLSKRGWIRPQH

SEQ ID NO: 102 - protein, 190 aa, Homo sapien
MFGFNKVSLFPSLSLCPSAFPSLSSPSLPGFSLLLGLCGPSPPSLPGWGRRRDAAGRGKEGGVADAAAASGGSGLLCGRLGRVGAAAAEGQAGALRGRPAQPSPAQPSPALPCPALPCARGAPTAPHPCSTPHPTLAGARQAAPHRSGNGCSSCPQAGPHLSQNQAPWWRRDQIAPQRRVGCLGPPAPRA

SEQ ID NO: 103 - protein, 442 aa, Homo sapien
RRGGLRRLRPFVRAVGSGGGGGRGRPGRCPAGTPSAAQPRAAQPCPALPCPALRPGRAHRAASMFDTTPHSGRSTPSSSPSLRKRLQLLPPSRPPPEPEPGTMVEKGSDSSSEKGGVPGTPSTQSLGSRNFIRNSKKMQSWYSMLSPTYKQRNEDFRKLFSKLPEAERLIVDYSCALQREILLQGRLYLSENWICFYSNIFRWETTISIQLKEVTCLKKEKTAKLIPNAIQICTESEKHFFTSFGARDRCFLLIFRLWQNALLEKTLSPRELWHLVHQCYGSELGLTSEDEDYVSPLQLNGLGTPKEVGDVIALSDITSSGAADRSQEPSPVGSRRGHVTPNLSRASSDADHGAEEDKEEQVDSQPDASSSQTVTPVAEPPSTEPTQPDGPTTLGPLDLLPSEELLTDTSNSSSSTGEEGLGCPASRPLRPPPHQLCLPCGR

SEQ ID NO: 104 - protein, 99 aa, Homo sapien
MEDPSVRCSFQLTSGRRTSAMKVTGIFLLSALALLSLSGNTGADSLGREAKCYNELNGCTKIYDPVCGTDGNTYPNECVLCFENRKRQTSILIQKSGPC

SEQ ID NO: 105 - protein, 106 aa, Homo sapien
ALDVKVSHEGGRSVLPQSKYSVRHHIPYPSNGELHSQYHGYYVKLNAPQHPPVDVEDGDGSSQSSSALVHKPSANKWSPSKSVTKPVAKESKAEPKAKKSELAIPK

SEQ ID NO: 106 - protein, 93 aa, Homo sapien
  MISC_FEATURE (93)..(93): X=any amino acid
ALDVKVSHEGGRSVLPQSKYSVRHHIPYPSNGELHSQYHGYYVKLNAPQHPPVDVEDGDGSSQSSSALVHKPSANKWSPSKSVTKPVAKESKX

SEQ ID NO: 107 - protein, 100 aa, Homo sapien
MYMYIQTTTLTVSMSLSASVSLGMLYMPKVYIIIFHPEQNVQKRKRSFKAVVTAATMQSKLIQKGNDRPNGEVKSELCESLETNTSSTKTTYISYSNHSI

SEQ ID NO: 108 - protein, 558 aa, Homo sapien
WKFTVTFKSRKLANAHRAFSPWALMVASRRCSLRWCPFCCVARINFGSWIAIPPVEKMVCEGKRSASCPCFFLLTAKFYWILTMMQRTHSQEYAHSIRVDGDIILGGLFPVHAKGERGVPCGELKKEKGIHRLEAMLYAIDQINKDPDLLSNITLGVRILDTCSRDTYALEQSLTFVQALIEKDASDVKCANGDPPIFTKPDKISGVIGAAASSVSIMVANILRLFKIPQISYASTAPELSDNTRYDFFSRVVPPDSYQAQAMVDIVTALGWNYVSTLASEGNYGESGVEAFTQISREIGGVCIAQSQKIPREPRPGEFEKIIKRLLETPNARAVIMFANEDDIRRILEAAKKLNQSGHFLWIGSDSWGSKIAPVYQQEEIAEGAVTILPKRASIDGFDRYFRSRTLANNRRNVWFAEFWEENFGCKLGSHGKRNSHIKKCTGLERIARDSSYEQEGKVQFVIDAVYSMAYALHNMHKDLCPGYIGLCPRMSTIDGKELLGYIRAVNFNGCRRGIQMSLPWPTLFTPSFSSSWAVLALLSLLMKTEMLLDVMISSSIK

SEQ ID NO: 109 - protein, 501 aa, Homo sapien
MVCEGKRSASCPCFFLLTAKFYWILTMMQRTHSQEYAHSIRVDGDIILGGLFPVHAKGERGVPCGELKKEKGIHRLEAMLYAIDQINKDPDLLSNITLGVRILDTCSRDTYALEQSLTFVQALIEKDASDVKCANGDPPIFTKPDKISGVIGAAASSVSIMVANILRLFKIPQISYASTAPELSDNTRYDFFSRVVPPDSYQAQAMVDIVTALGWNYVSTLASEGNYGESGVEAFTQISREIGGVCIAQSQKIPREPRPGEFEKIIKRLLETPNARAVIMFANEDDIRRILEAAKKLNQSGHFLWIGSDSWGSKIAPVYQQEEIAEGAVTILPKRASIDGFDRYFRSRTLANNRRNVWFAEFWEENFGCKLGSHGKRNSHIKKCTGLERIARDSSYEQEGKVQFVIDAVYSMAYALHNMHKDLCPGYIGLCPRMSTIDGKELLGYIRAVNFNGCRRGIQMSLPWPTLFTPSFSSSWAVLALLSLLMKTEMLLDVMISSSIK

SEQ ID NO: 110 - protein, 338 aa, Homo sapien
WKFTVTFKSRKLANAHRAFSPWALMVASRRCSLRWCPFCCVARINFGSWIAIPPVEKMVCEGKRSASCPCFFLLTAKFYWILTMMQRTHSQEYAHSIRVDGDIILGGLFPVHAKGERGVPCGELKKEKGIHRLEAMLYAIDQINKDPDLLSNITLGVRILDTCSRDTYALEQSLTFVQALIEKDASDVKCANGDPPIFTKPDKISGVIGAAASSVSIMVANILRLFKIPQISYASTAPELSDNTRYDFFSRVVPPDSYQAQAMVDIVTALGWNYVSTLASEGNYGESGVEAFTQISREIGYPSLFGIQGCLHECFAILCQVVYQFLLLMQLSDAQTVY

SEQ ID NO: 111 - protein, 281 aa, Homo sapien
MVCEGKRSASCPCFFLLTAKFYWILTMMQRTHSQEYAHSIRVDGDIILGGLFPVHAKGERGVPCGELKKEKGIHRLEAMLYAIDQINKDPDLLSNITLGVRILDTCSRDTYALEQSLTFVQALIEKDASDVKCANGDPPIFTKPDKISGVIGAAASSVSIMVANILRLFKIPQISYASTAPELSDNTRYDFFSRVVPPDSYQAQAMVDIVTALGWNYVSTLASEGNYGESGVEAFTQISREIGYPSLFGIQGCLHECFAILCQVVYQFLLLMQLSDAQTVY

SEQ ID NO: 112 - protein, 433 aa, Homo sapien
MVVFLSGDNLSSPSHSGIIWQCLETFWVLTNRRRMPLASSRSAMLLSILQCPGQPHKDSSSLNVNSAEVEEPYFTGTRQEESVCPRTLVIITCPLQYSTTQRQCFLGNGFFSLQVLHFENVKDVPFGFQTVTSDVNKLSSFYSLKLIKRLYVDKSLNLSTEFISSTKRPYAKELETVDFKDKLEETKGQINNSIKDLTDGHFENILADNSVNDQTKILVVNAAYFVGKWMKKFPESETKECPFRVNKTDTKPVQMMNMEATFCMGNIDSINCKIIELPFQNKHLSMFILLPKDVEDESTGLEKIEKQLNSESLSQWTNPSTMANAKVKLSIPKFKVEKMIDPKACLENLGLKHIFSEDTSDFSGMSETKGVALSNVIHKVCLEITEDGGDSIEVPGARILQHKDELNADHPFIYIIRHNKTRNIIFFGKFCSP

SEQ ID NO: 113 - protein, 705 aa, Homo sapien
MERMWTSEEFSFKKNIMKYILITQGLLLVEVYNLDTSTFCFCCSTVHKTFSNLQGKIVEVVEVKLKFKIDSVNTIGKEAELRIFWLFMCSVLLSSHRSCVVTQDSGSTKPELTGWIDLQPIFFHYTAAFLFLKKQKSMEQLLQKEAPLFNWLTESMNHCRFACPPVCFSHRFYLSEWLLHLNTVAMVSEQLKTSFLHLHSKGFIFSRNKVVLGCFNSVDHLETREQGPWITMSTLQVFGNAGKGLHSSNLLTSFLSVRPMLACNYIFLNLKTKEISDIFSVSFFSFHSSLKSHYCITFQIMTWIEGSLFCQGLCEVNIRISTTTKLKNEAALTEMLAKTNSLDCFCHHLLTWNSFHIYFSYEEIQCQSDHVTSKQNFIEAYPCLNYSKIKYNKVNYFALCSSIVLSYIYILICILLSKVSETTCWRAVAFRQHQHHLKALLNTHYWKRGENTGIMPVIPVLWETEAGGSRGAQEFKIRLGNTARPLSLQKQKQKTNRHGSAYLWSELLGSLRQEDHLNPGVRGCSELLLGQLQSSLGSKVRPCLLKKQNQKLDCWGPPRVSDSVGLAVGMVGLVICLSNKRPGNAPAAGPGPHFADYYSEKSTNSDVGFLLFLISEFIWGRLFNLVDPHLLSCEVEVNATCLETVRMRNSELKYQAQRAWMLEEMLTPMVRPSLTLLSYKVRSEIQYLLRFLSGVKCCDSKSLIL

SEQ ID NO: 114 - protein, 226 aa, Homo sapien
LIINDCYSHSIGGVVLVNLAGSEKPAGRDTVGSIWSLAGAMLYAVYIVMIKRKVDREDKLDIPMFFGFVGLFNLLLLWPGFFLLHYTGFEDFEFPNKVVLMCIIINGLIGTVLSEFLWLWGCFLTSSLIGTLALSLTIPLSIIADMCMQKVQFSWLFFAGAIPVFFSFFIVTLLCHYNNWDPVMVGIRRIFAFICRKHRIQRVPEDSEQCESLISMHSVSQEDGAS

SEQ ID NO: 115 - protein, 570 aa, Homo sapien
MVPPRRHRGAGRPGVLSSSPPFRLRSAKFSGIALEDLRRALKTRLQMVCVFVMNRMNSQNSGFTQRRRMALGIVILLLVDVIWVASSELTSYVFTQYNKPFFSTFAKTSMFVLYLLGFIIWKPWRQQCTRGLRGKHAAFFADAEGYFAACTTDTTMNSSLSEPLYVPVKFHDLPSEKPESTNIDTEKTPKKSRVRFSNIMEIRQLPSSHALEAKLSRMSYPVKEQESILKTVGKLTATQVAKISFFFCFVWFLANLSYQEALSDTQVAIVNILSSTSGLFTLILAAVFPSNSGDRFTLSKLLAVILSIGGVVLVNLAGSEKPAGRDTVGSIWSLAGAMLYAVYIVMIKRKVDREDKLDIPMFFGFVGLFNLLLLWPGFFLLHYTGFEDFEFPNKVVLMCIIINGLIGTVLSEFLWLWGCFLTSSLIGTLALSLTIPLSIIADMCMQKVQFSWLFFAGAIPVFFSFFIVTLLCHYNNWDPVMVGIRRIFAFICRKHRIQRWNLALSPKLECSGEISGHCNLYLLGSSDSPASASRVAGTTGARHHTQLIFVFLVETGFHHVGQDGLDLLNS

SEQ ID NO: 116 - protein, 135 aa, Homo sapien
MDGRLDGWVDGRGWPWMRSALHTQTRWERFVEHDSLQQEYMCAYLCGQKYLHLGFGAIQEEMSQKQLNQGLSTLWILNLKMGAGLCLKALLSHLLGPWFNKALSKLRKTTTTTQNKSSFFSSFLGKKALFFRERV

SEQ ID NO: 117 - protein, 82 aa, Homo sapien
MLLERRSVMDVVAAEVWGLTAQNLLLSCCGWMEGWMDGWMAVDGRGCAVPCIPKPGGSVLLSMTACSRNICVPICVDKNIYT

SEQ ID NO: 118 - protein, 146 aa, Homo sapien
NHYRRIGALDAARAAQCDGCGRGRGLGPDCSELAAVLLRMDGRLDGWVDGRGWPWMRSALHTQTRWERFVEHDSLQQEYMCAYLCGQKYLHLGFGAIQEEMSQKQLNQGLSTLWILNLKMGAGLCLKALLSHLLGPWFNKALSKLR

SEQ ID NO: 119 - protein, 614 aa, Homo sapien
MDSPSPMDPHMAEQTFEQAIQAASRIIRNEQFAIRRFQSMPVRLLGHSPVLRNITNSQAPDGRRKSEAGSGAASSSGEDKENVRFWKAGVGALREEEGACWGGSLACEDPPLPSWLQDGFVFKMPWKPTHPSSTHALAEWASRREAFAQRPSSAPDLMCLSPDRKMEVEELSPLALGRFSLTPAEGDTEEDDGFVDILESDLKVNSLVPPGPYLPIPGFAQKKRALSPVWQDHDVIPVSEEESEVTESQPNLWPMREEQVAGATVEGGLGGRGASHPNLEFARETGKAVLEDSGTGGVWPMPVGCDPVLANLASDDDAVPPGMESLISAPLVKTLEKEEEKDLVMYSKCQRLFRSPSMPCSVIRPILKRLERPQDRDTPVQNKRRRSVTPPEEQQEAEEPKARVLRSKSLCHDEIENLLDSDHRELIGDYSKAFLLQTVDGKHQDLKYISPETMVALLTGKFSNIVDKFVIVDCRYPYEYEGGHIKTAVNLPLERDAESFLLKSPIAPCSLDKRVILIFHCEFSSERGPRMCRFIRERDRAVNDYPSLYYPEMYILKGGYKEFFPQHPNFCEPQDYRPMNHEAFKDELKTFRLKTRSWAGERSRRELCSRLQDQ

SEQ ID NO: 120 - protein, 413 aa, Homo sapien
LKGKQPCPTRPLPSYPWVRPKEESSEPLWQDHDVIPVSEEESEVTESQPNLWPMREEQVAGATVEGGLGGRGASHPNLEFARETGKAVLEDSGTGGVWPMPVGCDPVLANLASDDDAVPPGMESLISAPLVKTLEKEEEKDLVMYSKCQRLFRSPSMPCSVIRPILKRLERPQDRDTPVQNKRRRSVTPPEEQQEAEEPKARVLRSKSLCHDEIENLLDSDHRELIGDYSKAFLLQTVDGKHQDLKYISPETMVALLTGKFSNIVDKFVIVDCRYPYEYEGGHIKTAVNLPLERDAESFLLKSPIAPCSLDKRVILIFHCEFSSERGPRMCRFIRERDRAVNDYPSLYYPEMYILKGGYKEFFPQHPNFCEPQDYRPMNHEAFKDELKTFRLKTRSWAGERSRRELCSRLQDQ

SEQ ID NO: 121 - protein, 331 aa, Homo sapien
MEDGVLKEGFLVKRGHIVHNWKARWFILRQNTLVYYKLEGGRRVTPPKGRILLDGCTITCPCLEYENRPLLIKLKTQTSTEYFLEACSREERDAWAFEITGAIHAGQPGKVQQLHSLRNSFKLPPHISLHRIVDKMHDSNTGIRSSPNMEQGSTYKKTFLGSSLVDWLISNSFTASRLEAVTLASMLMEENFLRPVGVRSMGAIRSGDLAEQFLDDSTALYTFAESYKKKISPKEEISLSTVELSGTVVKQGYLAKQGHKRKNWKVRRFVLRKDPAFLHYYDPSKEENRPVGGFSLRGSLVSALEDNGVPTGKVQLQPWPEDLRGLPPAPQ

SEQ ID NO: 122 - protein, 176 aa, Homo sapien
MSIMSYNGGAVMAMKGKNCVAIAADRRFGIQAQMVTTDFQKIFPMGDRLYIGLAGLATDVQTVAQRLKFRLNLYELKEGRQIKPYTLMSMVANLLYEKRFGPYYTEPVIAGLDPKTFKPFICSLDLIGCPMVTDDFVVSGTCAEQMYGMCESLWEPNMVRWWHGEGLGSELPTLGH

SEQ ID NO: 123 - protein, 158 aa, Homo sapien
MSIMSYNGGAVMAMKGKNCVAIAADRRFGIQAQMVTTDFQKIFPMGDRLYIGLAGLATDVQTVAQRLKFRLNLYELKEGRQIKPYTLMSMVANLLYEKRFGPYYTEPVIAGLDPKTFKPFICSLDLIGCPMVTDDFVVSGTCAEQMYLGRDHAKPNSS

SEQ ID NO: 124 - protein, 246 aa, Homo sapien
MLFPQVPPPRPGLADPPLPFPSSNLNKPYLFSVLLGAWQLGNPGSRSQKVGVAWVEPHPVYSWKEGACADIALVRLERSIQFSERVLPICLPDASIHLPPNTHCWISGWGSIQDGVPLPHPQTLQKLKVPIIDSEVCSHLYWRGAGQGPITEDMLCAGYLEGERDACLGDSGGPLMCQVDGAWLLAGIISWGEGCAERNRPGVYISLSAHRSWVEKIVQGVQLRGRAQGGGALRAPSQGSGAAARS

SEQ ID NO: 125 - protein, 273 aa, Homo sapien
MRLWLGRDAEGTELSRRHNWTKPEPQAPVAWERVAPSNLPQGHPLPKSFSSPPSPSNKREEEEEEFNFEVIPPPPEFSNDPEPPAPALQYLGRQSSPPRNNYSDLRQLPNAGPGAPPALGFSRFPAGARYAGAGGLERFSGGGRSLIKKRLYVGEPHRGPGLPHGGTGRSLSSPNCFGPQPGGPEMRRVNSAGRAPPGGLHAPRLSLEGAARGAAEAKHKAPGSADYGFAPAAGRSPYTTTRYGSPINTFTVRPGTRHPISYVCSGAHRKATS

SEQ ID NO: 126 - protein, 278 aa, Homo sapien
SSCHNLRLWLGRDAEGTELSRRHNWTKPEPQAPVAWERVAPSNLPQGHPLPKSFSSPPSPSNKREEEEEEFNFEVIPPPPEFSNDPEPPAPALQYLGRQSSPPRNNYSDLRQLPNAGPGAPPALGFSRFPAGARYAGAGGLERFSGGGRSLIKKRLYVGEPHRGPGLPHGGTGRSLSSPNCFGPQPGGPEMRRVNSAGRAPPGGLHAPRLSLEGAARGAAEAKHKAPGSADYGFAPAAGRSPYTTTRYGSPINTFTVRPGTRHPISYVCSGAHRKATS

SEQ ID NO: 127 - protein, 2306 aa, Homo sapien
MAALVLEDGSVLRGQPFGAAVSTAGEVVFQTGMVGYPEALTDPSYKAQILVLTYPLIGNYGIPPDEMDEFGLCKWFESSGIHVAALVVGECCPTPSHWSATRTLHEWLQQHGIPGLQGVDTRELTKKLREQGSLLGKLVQNGTEPSSLPFLDPNARPLVPEVSIKTPRVFNTGGAPRILALDCGLKYNQIRCLCQRGAEVTVVPWDHALDSQEYEGLFLSNGPGDPASYPSVVSTLSRVLSEPNPRPVFGICLGHQLLALAIGAKTYKMRYGNRGHNQPCLLVGSGRCFLTSQNHGFAVETDSLPADWAPLFTNANDGSNEGIVHNSLPFFSVQFHPEHQAGPSDMELLFDIFLETVKEATAGNPGGQTVRERLTERLCPPGIPTPGSGLPPPRKVLILGSGGLSIGQAGEFDYSGSQAIKALKEENIQTLLINPNIATVQTSQGLADKVYFLPITPHYVTQVIRNERPDGVLLTFGGQTALNCGVELTKAGVLARYGVRVLGTTVETIELTEDRRAFAARMAEIGEHVAPSEAGNSLEQAQAAAERLGYPVLVRAAFAVGGLGSGFASNREELSALVAPAFAHTSQVLVDKSLKGWKEIEYEVVRDAYGNCVTVCNMENLDPLGIHTGESIVVAPSQTLNDREYQLLRQTAIKVTQHLGIVGECNVQYALNPESEQYYIIEVNARLSRSSALASKATGYPLAYVAAKLALGIPLPELRNSVTGGTAAFEPSVDYCVVKIPRWDLSKFLRVSTKIGSCMKSVGEVMGIGRSFEEAFQKALRMVDENCVGFDHTVKPVSDMELETPTDKRIFVVAAALWAGYSVDRLYELTRIDRWFLHRMKRIIAHAQLLEQHRGQPLPPDLLQQAKCLGFSDKQIALAVLSTELAVRKLRQELGICPAVKQIDTVAAEWPAQTNYLYLTYWGTTHDLTFRTPHVLVLGSGVYRIGSSVEFDWCAVGCIQQLRKMGYKTIMVNYNPETVSTDYDMCDRLYFDEISFEVVMDIYELENPEGVILSMGGQLPNNMAMALHRQQCRVLGTSPEAIDSAENRFKFSRLLDTIGISQPQWRELSDLESARQFCQTVGYPCVVRPSYVLSGAAMNVAYTDGDLERFLSSAAAVSKEHPVVISKFIQEAKEIDVDAVASDGVVAAIAISEHVENAGVHSGDATLVTPPQDITAKTLERIKAIVHAVGQELQVTGPFNLQLIAKDDQLKVIECNVRVSRSFPFVSKTLGVDLVALATRVIMGEEVEPVGLMTGSGVVGVKVPQFSFSRLAGADVVLGVEMTSTGEVAGFGESRCEAYLKAMLSTGFKIPKKNILLTIGSYKNKSELLPTVRLLESLGYSLYASLGTADFYTEHGVKVTAVDWHFEEAVDGECPPQRSILEQLAEKNFELVINLSMRGAGGRRLSSFVTKGYRTRRLAADFSVPLIIDIKCTKLFVEALGQIGPAPPLKVHVDCMTSQKLVRLPGLIDVHVHLREPGGTHKEDFASGTAAALAGGITMVCAMPNTRPPIIDAPALALAQKLAEAGARCDFALFLGASSENAGTLGTVAGSAAGLKLYLNETFSELRLDSVVQWMEHFETWPSHLPIVAHAEQQTVAAVLMVAQLTQRSVHICHVARKEEVRVHLRSCCPCCFPSNTKGQVVLRGRRQQEESLETAGGGSRASTLAGLHHHFFEQGCWPLGLCVGQGIWVVPLLDLPIVPQILLIKAAKARGLPVTCEVAPHHLFLSHDDLERLGPGKGEVRPELGSRQDVEALWENMAVIDCFASDHAPHTLEEKCGSRPPPGFPGLETMLPLLLTAVSEGRLSLDDLLQRLHHNPRRIFHLPPQEDTYVEVDLEHEWTIPSHMPFSKAHWTPFEGQKVKGTVRRVVLRGEVAYIDGQVLVPPGYGQDVRKWPQGAVPQLPPSAPATSEMTTTPERPRRGIPGLPDGRFHLPPRIHRASDPGLPAEEPKEKSSRKVAEPELMGTPDGTCYPPPPVPRQASPQNLGTPGLLHPQTSPLLHSLVGQHILSVQQFTKDQMSHLFNVAHTLRMMVQKERSLDILKGKVMASMFYEVSTRTSSSFAAAMARLGGAVLSFSEATSSVQKGESLADSVQTMSCYADVVVLRHPQPGAVELAAKHCRRPVINAGDGVGEHPTQALLDIFTIREELGTVNGMTITMVGDLKHGRTVHSLACLLTQYRVSLRYVAPPSLRMPPTVRAFVASRGTKQEEFESIEEALPDTDVLYMTRIQKERFGSTQEYEACFGQFILTPHIMTRAKKKMVVMHPMPRVNEISVEVDSDPRAAYFRQAENGMYIRMALLATVLGRF

SEQ ID NO: 128 - protein, 1651 aa, Homo sapien
PPPLSSLPMAALVLEDGSVLRGQPFGAAVSTAGEVVFQTGMVGYPEALTDPSYKAQILVLTYPLIGNYGIPPDEMDEFGLCKWFESSGIHVAALVVGECCPTPSHWSATRTLHEWLQQHGIPGLQGVDTRELTKKLREQGSLLGKLVQNGTEPSSLPFLDPNARPLVPEVSIKTPRVFNTGGAPRILALDCGLKYNQIRCLCQRGAEVTVVPWDHALDSQEYEGLFLSNGPGDPASYPSVVSTLSRVLSEPNPRPVFGICLGHQLLALAIGAKTYKMRYGNRGHNQPCLLVGSGRCFLTSQNHGFAVETDSLPADWAPLFTNANDGSNEGIVHNSLPFFSVQFHPEHQAGPSDMELLFDIFLETVKEATAGNPGGQTVRERLTERLCPPGIPTPGSGLPPPRKVLILGSGGLSIGQAGEFDYSGSQAIKALKEENIQTLLINPNIATVQTSQGLADKVYFLPITPHYVTQVIRNERPDGVLLTFGGQTALNCGVELTKAGVLARYGVRVLGTTVETIELTEDRRAFAARMAEIGEHVAPSEAGNSLEQAQAAAERLGYPVLVRAAFAVGGLGSGFASNREELSALVAPAFAHTSQVLVDKSLKGWKEIEYEVVRDAYGNCVTVCNMENLDPLGIHTGESIVVAPSQTLNDREYQLLRQTAIKVTQHLGIVGECNVQYALNPESEQYYIIEVNARLSRSSALASKATGYPLAYVAAKLALGIPLPELRNSVTGGTAAFEPSVDYCVVKIPRWDLSKFLRVSTKIGSCMKSVGEVMGIGRSFEEAFQKALRMVDENCVGFDHTVKPVSDMELETPTDKRIFVVAAALWAGYSVDRLYELTRIDRWFLHRMKRIIAHAQLLEQHRGQPLPPDLLQQAKCLGFSDKQIALAVLSTELAVRKLRQELGICPAVKQIDTVAAEWPAQTNYLYLTYWGTTHDLTFRTPHVLVLGSGVYRIGSSVEFDWCAVGCIQQLRKMGYKTIMVNYNPETVSTDYDMCDRLYFDEISFEVVMDIYELENPEGVILSMGGQLPNNMAMALHRQQCRVLGTSPEAIDSAENRFKFSRLLDTIGISQPQWRELSDLESARQFCQTVGYPCVVRPSYVLSGAAMNVAYTDGDLERFLSSAAAVSKEHPVVISKFIQEAKEIDVDAVASDGVVAAIAISEHVENAGVHSGDATLVTPPQDITAKTLERIKAIVHAVGQELQVTGPFNLQLIAKDDQLKVIECNVRVSRSFPFVSKTLGVDLVALATRVIMGEEVEPVGLMTGSGVVGVKVPQFSFSRLAGADVVLGVEMTSTGEVAGFGESRCEAYLKAMLSTGFKIPKKNILLTIGSYKNKSELLPTVRLLESLGYSLYASLGTADFYTEHGVKVTAVDWHFEEAVDGECPPQRSILEQLAEKNFELVINLSMRGAGGRRLSSFVTKGYRTRRLAADFSVPLIIDIKCTKLFVEALGQIGPAPPLKVHVDCMTSQKLVRLPGLIDVHVHLREPGGTHKEDFASGTAAALAGGITMVCAMPNTRPPIIDAPALALAQKLAEAGARCDFALFLGASSENAGTLGTVAGSAAGLKLYLNETFSELRLDSVVQWMEHFETWPSHLPIVAHAEQQTVAAVLMVAQLTQRSVHICHVARKEEVRVHLRSCCPCCFPSNTKGQGSP

SEQ ID NO: 129 - protein, 2242 aa, Homo sapien
MAALVLEDGSVLRGQPFGAAVSTAGEVVFQTGMVGYPEALTDPSYKAQILVLTYPLIGNYGIPPDEMDEFGLCKWFESSGIHVAALVVGECCPTPSHWSATRTLHEWLQQHGIPGLQGVDTRELTKKLREQGSLLGKLVQNGTEPSSLPFLDPNARPLVPEVSIKTPRVFNTGGAPRILALDCGLKYNQIRCLCQRGAEVTVVPWDHALDSQEYEGLFLSNGPGDPASYPSVVSTLSRVLSEPNPRPVFGICLGHQLLALAIGAKTYKMRYGNRGHNQPCLLVGSGRCFLTSQNHGFAVETDSLPADWAPLFTNANDGSNEGIVHNSLPFFSVQFHPEHQAGPSDMELLFDIFLETVKEATAGNPGGQTVRERLTERLCPPGIPTPGSGLPPPRKVLILGSGGLSIGQAGEFDYSGSQAIKALKEENIQTLLINPNIATVQTSQGLADKVYFLPITPHYVTQVIRNERPDGVLLTFGGQTALNCGVELTKAGVLARYGVRVLGTTVETIELTEDRRAFAARMAEIGEHVAPSEAGNSLEQAQAAAERLGYPVLVRAAFAVGGLGSGFASNREELSALVAPAFAHTSQVLVDKSLKGWKEIEYEVVRDAYGNCVTVCNMENLDPLGIHTGESIVVAPSQTLNDREYQLLRQTAIKVTQHLGIVGECNVQYALNPESEQYYIIEVNARLSRSSALASKATGYPLAYVAAKLALGIPLPELRNSVTGGTAAFEPSVDYCVVKIPRWDLSKFLRVSTKIGSCMKSVGEVMGIGRSFEEAFQKALRMVDENCVGFDHTVKPVSDMELETPTDKRIFVVAAALWAGYSVDRLYELTRIDRWFLHRMKRIIAHAQLLEQHRGQPLPPDLLQQAKCLGFSDKQIALAVLSTELAVRKLRQELGICPAVKQIDTVAAEWPAQTNYLYLTYWGTTHDLTFRTPHVLVLGSGVYRIGSSVEFDWCAVGCIQQLRKMGYKTIMVNYNPETVSTDYDMCDRLYFDEISFEVVMDIYELENPEGVILSMGGQLPNNMAMALHRQQCRVLGTSPEAIDSAENRFKFSRLLDTIGISQPQWRELSDLESARQFCQTVGYPCVVRPSYVLSGAAMNVAYTDGDLERFLSSAAAVSKEHPVVISKFIQEAKEIDVDAVASDGVVAAIAISEHVENAGVHSGDATLVTPPQDITAKTLERIKAIVHAVGQELQVTGPFNLQLIAKDDQLKVIECNVRVSRSFPFVSKTLGVDLVALATRVIMGEEVEPVGLMTGSGVVGVKVPQFSFSRLAGADVVLGVEMTSTGEVAGFGESRCEAYLKAMLSTGFKIPKKNILLTIGSYKNKSELLPTVRLLESLGYSLYASLGTADFYTEHGVKVTAVDWHFEEAVDGECPPQRSILEQLAEKNFELVINLSMRGAGGRRLSSFVTKGYRTRRLAADFSVPLIIDIKCTKLFVEALGQIGPAPPLKVHVDCMTSQKLVRLPGLIDVHVHLREPGGTHKEDFASGTAAALAGGITMVCAMPNTRPPIIDAPALALAQKLAEAGARCDFALFLGASSENAGTLGTVAGSAAGLKLYLNETFSELRLDSVVQWMEHFETWPSHLPIVAHAEQQTVAAVLMVAQLTQRSVHICHVARKEEILLIKAAKARGLPVTCEVAPHHLFLSHDDLERLGPGKGEVRPELGSRQDVEALWENMAVIDCFASDHAPHTLEEKCGSRPPPGFPGLETMLPLLLTAVSEGRLSLDDLLQRLHHNPRRIFHLPPQEDTYVEVDLEHEWTIPSHMPFSKAHWTPFEGQKVKGTVRRVVLRGEVAYIDGQVLVPPGYGQDVRKWPQGAVPQLPPSAPATSEMTTTPERPRRGIPGLPDGRFHLPPRIHRASDPGLPAVFLRPGAGIPRGSRAWAEEPKEKSSRKVAEPELMGTPDGTCYPPPPVPRQASPQNLGTPGLLHPQTSPLLHSLVGQHILSVQQFTKDQMSHLFNVAHTLRMMVQKERSLDILKGKVMASMFYEVSTRTSSSFAAAMARLGGAVLSFSEATSSVQKGESLADSVQTMSCYADVVVLRHPQPGAVELAAKHCRRPVINAGDGVGEHPTQALLDIFTIREELGTVNGMTITMVGDLKHGRTVHSLACLLTQYRVSLRYVAPPSLRMPPTVRAFVASRGTKQEEFESIEEALPDTDVLYMTRIQKERFGSTQEYEACFGQFILTPHIMTRAKKKMVVMHPMPRVNEISVEVDSDPRAAYFRQAENGMYIRMALLATVLGRF

SEQ ID NO: 130 - protein, 371 aa, Homo sapien [sequence omitted]

SEQ ID NO: 131 - protein, 970 aa, Homo sapien
MAGALAGLAAGLQVPRVAPSPDSDSDTDSEDPSLRRSAGGLLRSQVIHSGHFMVSSPHSDSLPRRRDQEGSVGPSDFGPRSIDPTLTRLFECLSLAYSGKLVSPKWKNFKGLKLLCRDKIRLNNAIWRAWYIQYVKRRKSPVCGFVTPLQGPEADAHRKPEAVVLEGNYWKRRIEVVMREYHKWRIYYKKRVSGGGPGRPQSFPPAAAGYRPPRKIPGKGILTPELAPLGPSIQSRADSATVWPQRLLAASLPRGRLRKPSREDDLLAPKQAEGRWPPPEQWCKQLFSSVVPVLLGDPEEEPGGRQLLDLNCFLSDISDTLFTMTQSGPSPLQLPPEDAYVGNADMIQPDLTPLQPSLDDFMDISDFFTNSRLPQPPMPSNFPEPPSFSPVVDSLFSSGTLGPEVPPASSAMTHLSGHSRLQARNSCPGPLDSSAFLSSDFLLPEDPKPRLPPPPVPPPLLHYPPPAKVPGLEPCPPPPFPPMAPPTALLQEEPLFSPRFPFPTVPPAPGVSPLPAPAAFPPTPQSVPSPAPTPFPIELLPLGYSEPAFGPCFSMPRGKPPAPSPRGQKASPPTLAPATASPPTTAGSNNPCLTQLLTAAKPEQALEPPLVSSTLLRSPGSPQETVPEFPCTFLPPTPAPTPPRPPPGPATLAPSRPLLVPKAERLSPPAPSGKERGCRDWGNLGDEGKRRKKKGTGSGARWEEGGNGDPFPWVGLSVGLSVPTTGSERRLSGDLSSMPGPGTLSVRVSPPQPILSRGRPDSNKTENRRITHISAEQKRRFNIKLGFDTLHGLVSTLSAQPSLKVSKATTLQKTAEYILMLQQERAGLQEEAQQLRDEIEELNAAINLCQQQLPATGVPITHQRFDQMRDMFDDYVRTRTLHNWKFWVFSILIRPLFESFNGMVSTASVHTLRQTSLAWLDQYCSLPALRPTVLNSLRQLGTSTSILTDPGRIPEQATRAVTEGTLGKPL

SEQ ID NO: 132 - protein, 719 aa, Homo sapien
AVPRAARSRDQAVAAATAMAGALAGLAAGLQVPRVAPSPDSDSDTDSEDPSLRRSAGGLLRSQVIHSGHFMVSSPHSDSLPRRRDQEGSVGPSDFGPRSIDPTLTRLFECLSLAYSGKLVSPKWKNFKGLKLLCRDKIRLNNAIWRAWYIQYVKRRKSPVCGFVTPLQGPEADAHRKPEAVVLEGNYWKRRIEVVMREYHKWRIYYKKRVSGGGPGRPQSFPPAAAGYRPPRKIPGKGILTPELAPLGPSIQSRADSATVWPQRLLAASLPRGRLRKPSREDDLLAPKQAEGRWPPPEQWCKQLFSSVVPVLLGDPEEEPGGRQLLDLNCFLSDISDTLFTMTQSGPSPLQLPPEDAYVGNADMIQPDLTPLQPSLDDFMDISDFFTNSRLPQPPMPSNFPEPPSFSPVVDSLFSSGTLGPEVPPASSAMTHLSGHSRLQARNSCPGPLDSSAFLSSDFLLPEDPKPRLPPPPVPPPLLHYPPPAKVPGLEPCPPPPFPPMAPPTALLQEEPLFSPRFPFPTVPPAPGVSPLPAPAAFPPTPQSVPSPAPTPFPIELLPLGYSEPAFGPCFSMPRGKPPAPSPRGQKASPPTLAPATASPPTTAGSNNPCLTQLLTAAKPEQALEPPLVSSTLLRSPGSPQETVPEFPCTFLPPTPAPTPPRPPPGPATLAPSRPLLVPKAERLSPPAPSGKERGCRDWGNLGDEGKRRKKKGTGSGAR

SEQ ID NO: 133 - protein, 629 aa, Homo sapien
MAVPWEQASLGGQRPCLGTQRPATDFFTNSRLPQPPMPSNFPEPPSFSPVVDSLFSSGTLGPEVPPASSAMTHLSGHSRLQARNSCPGPLDSSAFLSSDFLLPEDPKPRLPPPPVPPPLLHYPPPAKVPGLEPCPPPPFPPMAPPTALLQEEPLFSPRFPFPTVPPAPGVSPLPAPAAFPPTPQSVPSPAPTPFPIELLPLGYSEPAFGPCFSMPRGKPPAPSPRGQKASPPTLAPATASPPTTAGSNNPCLTQLLTAAKPEQALEPPLVSSTLLRSPGSPQETVPEFPCTFLPPTPAPTPPRPPPGPATLAPSRPLLVPKAERLSPPAPSGKERGCRDWGNLGDEGKRRKKKGTGSGARGEEGGNGDPFPWVGLSVGLSVPTTGSERRLSGDLSSMPGPGTLSVRVSPPQPILSRGRPDSNKTENRRITHISAEQKRRFNIKLGFDTLHGLVSTLSAQPSLKVSKATTLQKTAEYILMLQQERAGLQEEAQQLRDEIEELNAAINLCQQQLPATGVPITHQRFDQMRDMFDDYVRTRTLHNWKFWVFSILIRPLFESFNGMVSTASVHTLRQTSLAWLDQYCSLPALRPTVLNSLRQLGTSTSILTDPGRIPEQATRAVTEGTLGKPL

SEQ ID NO: 134 - protein, 382 aa, Homo sapien
GTTPTPVPVPGGGGGCPGAEVCMAVPWEQASLGGQRPCLGTQRPATDFFTNSRLPQPPMPSNFPEPPSFSPVVDSLFSSGTLGPEVPPASSAMTHLSGHSRLQARNSCPGPLDSSAFLSSDFLLPEDPKPRLPPPPVPPPLLHYPPPAKVPGLEPCPPPPFPPMAPPTALLQEEPLFSPRFPFPTVPPAPGVSPLPAPAAFPPTPQSVPSPAPTPFPIELLPLGYSEPAFGPCFSMPRGKPPAPSPRGQKASPPTLAPATASPPTTAGSNNPCLTQLLTAAKPEQALEPPLVSSTLLRSPGSPQETVPEFPCTFLPPTPAPTPPRPPPGPATLAPSRPLLVPKAERLSPPAPSGKERGCRDWGNLGDEGKRRKKKGTGSGAR

SEQ ID NO: 135 - protein, 1009 aa, Homo sapien
MAGALAGLAAGLQVPRVAPSPDSDSDTDSEDPSLRRSAGGLLRSQVIHSGHFMVSSPHSDSLPRRRDQEGSVGPSDFGPRSIDPTLTRLFECLSLAYSGKLVSPKWKNFKGLKLLCRDKIRLNNAIWRAWYIQYVKRRKSPVCGFVTPLQGPEADAHRKPEAVVLEGNYWKRRIEVVMREYHKWRIYYKKRVSGGGPGRPQSFPPAAAGYRPPRKIPGKGILTPELAPLGPSIQSRADSATVWPQRLLAASLPRGRVSSCGKWGISSLVSRGDFGGKVMEDGAKGSGVQLCVSLQLRKPSREDDLLAPKQAEGRWPPPEQWCKQLFSSVVPVLLGDPEEEPGGRQLLDLNCFLSDISDTLFTMTQSGPSPLQLPPEDAYVGNADMIQPDLTPLQPSLDDFMDISDFFTNSRLPQPPMPSNFPEPPSFSPVVDSLFSSGTLGPEVPPASSAMTHLSGHSRLQARNSCPGPLDSSAFLSSDFLLPEDPKPRLPPPPVPPPLLHYPPPAKVPGLEPCPPPPFPPMAPPTALLQEEPLFSPRFPFPTVPPAPGVSPLPAPAAFPPTPQSVPSPAPTPFPIELLPLGYSEPAFGPCFSMPRGKPPAPSPRGQKASPPTLAPATASPPTTAGSNNPCLTQLLTAAKPEQALEPPLVSSTLLRSPGSPQETVPEFPCTFLPPTPAPTPPRPPPGPATLAPSRPLLVPKAERLSPPAPSGKERGCRDWGNLGDEGKRRKKKGTGSGARWEEGGNGDPFPWVGLSVGLSVPTTGSERRLSGDLSSMPGPGTLSVRVSPPQPILSRGRPDSNKTENRRITHISAEQKRRFNIKLGFDTLHGLVSTLSAQPSLKVSKATTLQKTAEYILMLQQERAGLQEEAQQLRDEIEELNAAINLCQQQLPATGVPITHQRFDQMRDMFDDYVRTRTLHNWKFWVFSILIRPLFESFNGMVSTASVHTLRQTSLAWLDQYCSLPALRPTVLNSLRQLGTSTSILTDPGRIPEQATRAVTEGTLGKPL

SEQ ID NO: 136 - protein, 469 aa, Homo sapien
RRLWGESDGGWGKGSGVQLCVSLQLRKPSREDDLLAPKQAEGRWPPPEQWCKQLFSSVVPVLLGDPEEEPGGRQLLDLNCFLSDISDTLFTMTQSGPSPLQLPPEDAYVGNADMIQPDLTPLQPSLDDFMDISDFFTNSRLPQPPMPSNFPEPPSFSPVVDSLFSSGTLGPEVPPASSAMTHLSGHSRLQARNSCPGPLDSSAFLSSDFLLPEDPKPRLPPPPVPPPLLHYPPPAKVPGLEPCPPPPFPPMAPPTALLQEEPLFSPRFPFPTVPPAPGVSPLPAPAAFPPTPQSVPSPAPTPFPIELLPLGYSEPAFGPCFSMPRGKPPAPSPRGQKASPPTLAPATASPPTTAGSNNPCLTQLLTAAKPEQALEPPLVSSTLLRSPGSPQETVPEFPCTFLPPTPAPTPPRPPPGPATLAPSRPLLVPKAERLSPPAPSGKERGCRDWGNLGDEGKRRKKKGTGSGAR

SEQ ID NO: 137 - protein, 191 aa, Homo sapien
VLPCPGPGPLVTSCFPPTVSPYPHPGPGWSPAHRGATGGNGPDSGATDSPAVGDDDREQVAGPKGKAPPVPAPARESGNRSARPLHSLSVLAFDQERLERKILALRQARRPVPPEVAQQYQDIMQRSQWQRAQLEQGGVGIRREYAAQLERQLQFYTEAARRLGNDGSRDAAKEALYRRNLVESELQRLRR

SEQ ID NO: 138 - protein, 117 aa, Homo sapien
EGLGDGHLEGEGLGDGHLEGEGLGDGHLEGEGLGDGHLAGDGLGDGHSPGGLWAVRPHPKPPFPRHPFSEYAAQLERQLQFYTEAARRLGNDGSRDAAKEALYRRNLVESELQRLRR

SEQ ID NO: 139 - protein, 165 aa, Homo sapien
RVSCSGSAGEEPMGRAAPRKRAAGPDTGKSRHSHEPDKQTISGQSVLDSPLIRAPSPARASVAAGVGNHACQPVCAPHPGLAGPWRVLFAQPRGVRPLARPGAGRVAGAKPRGPLQALYFLFLPSLNPKALLHPKEATEAGRATLSPQGRRPGPAGSPGPAHGIK

SEQ ID NO: 140 - protein, 146 aa, Homo sapien
EGLGDGHLEGEGLGDGHLEGEGLGDGHLEGEGLGDGHLAGDGLGDGHSPGGLWAVRPHPKPPFPRHPFSEYAAQLERQLQFYTEAARRLGNDGSRVSWSRAGWALGSGQGGACRDYLLNAHPPQDAAKEALYRRNLVESELQRLRR

SEQ ID NO: 141 - protein, 165 aa, Homo sapien; identical to SEQ ID NO: 139

SEQ ID NO: 142 - protein, 636 aa, Homo sapien
MTSSGPGPRFLLLLPLLLPPAASASDRPRGRDPVNPEKLLVITVATAETEGYLRFLRSAEFFNYTVRTLGLGEEWRGGDVARTVGGGQKVRWLKKEMEKYADREDMIIMFVDSYDVILAGSPTELLKKFVQSGSRLLFSAESFCWPEWGLAEQYPEVGTGKRFLNSGGFIGFATTIHQIVRQWKYKDDDDDQLFYTRLYLDPGLREKLSLNLDHKSRIFQNLNGALDEVVLKFDRNRVRIRNVAYDTLPIVVHGNGPTKLQLNYLGNYVPNGWTPEGGCGFCNQDRRTLPGGQPPPRVFLAVFVEQPTPFLPRFLQRLLLLDYPPDRVTLFLHNNEVFHEPHIADSWPQLQDHFSAVKLVGPEEALSPGEARDMAMDLCRQDPECEFYFSLDADAVLTNLQTLRILIEENRKVIAPMLSRHGKLWSNFWGALSPDEYYARSEDYVELVQRKRVGVWNVPYISQAYVIRGDTLRMELPQRDVFSGSDTDPDMAFCKSFRDKGIFLHLSNQHEFGRLLATSRYDTEHLHPDLWQIFDNPVDWKEQYIHENYSRALEGEGIVEQPCPDVYWFPLLSEQMCDELVAEMEHYGQWSGGRHETALQECLMPVELCPAVSSSHHTASKAAMSSLGAIEATGKP

SEQ ID NO: 143 - protein, 682 aa, Homo sapien
MTSSGPGPRFLLLLPLLLPPAASASDRPRGRDPVNPEKLLVITVATAETEGYLRFLRSAEFFNYTVRTLGLGEEWRGGDVARTVGGGQKVRWLKKEMEKYADREDMIIMFVDSYDVILAGSPTELLKKFVQSGSRLLFSAESFCWPEWGLAEQYPEVGTGKRFLNSGGFIGFATTIHQIVRQWKYKDDDDDQLFYTRLYLDPGLREKLSLNLDHKSRIFQNLNGALDEVVLKFDRNRVRIRNVAYDTLPIVVHGNGPTKLQLNYLGNYVPNGWTPEGGCGFCNQDRRTLPGGQPPPRVFLAVFVEQPTPFLPRFLQRLLLLDYPPDRVTLFLHNNEVFHEPHIADSWPQLQDHFSAVKLVGPEEALSPGEARDMAMDLCRQDPECEFYFSLDADAVLTNLQTLRILIEENRKVIAPMLSRHGKLWSNFWGALSPDEYYARSEDYVELVQRKRVGVWNVPYISQAYVIRGDTLRMELPQRDVFSGSDTDPDMAFCKSFRDKGIFLHLSNQHEFGRLLATSRYDTEHLHPDLWQIFDNPVDWKEQYIHENYSRALEGEGIVEQPCPDVYWFPLLSEQMCDELVAEMEHYGQWSGGRHEVRAWARRAEAFPEEEVQDLVNKQWNQENGSKEGFPGGRQTLGSQLHSFMYSRNIYCWAQWLMPVILALWEAEAGGLLEQGEFEASL

SEQ ID NO: 144 - protein, 654 aa, Homo sapien
MTSSGPGPRFLLLLPLLLPPAASASDRPRGRDPVNPEKLLVITVATAETEGYLRFLRSAEFFNYTVRTLGLGEEWRGGDVARTVGGGQKVRWLKKEMEKYADREDMIIMFVDSYDVILAGSPTELLKKFVQSGSRLLFSAESFCWPEWGLAEQYPEVGTGKRFLNSGGFIGFATTIHQIVRQWKYKDDDDDQLFYTRLYLDPGLREKLSLNLDHKSRIFQNLNGALDEVVLKFDRNRVRIRNVAYDTLPIVVHGNGPTKLQLNYLGNYVPNGWTPEGGCGFCNQDRRTLPGGQPPPRVFLAVFVEQPTPFLPRFLQRLLLLDYPPDRVTLFLHNNEVFHEPHIADSWPQLQDHFSAVKLVGPEEALSPGEARDMAMDLCRQDPECEFYFSLDADAVLTNLQTLRILIEENRKVIAPMLSRHGKLWSNFWGALSPDEYYARSEDYVELVQRKRVGVWNVPYISQAYVIRGDTLRMELPQRDVFSGSDTDPDMAFCKSFRDKGIFLHLSNQHEFGRLLATSRYDTEHLHPDLWQIFDNPVDWKEQYIHENYSRALEGEGIVEQPCPDVYWFPLLSEQMCDELVAEMEHYGQWSGGRHEWEGTNGAGPHMKGGPGQVIGSLADNLAATGGGKGPAKSGPNHQHRARGQTGTPKGDTG

SEQ ID NO: 145 - protein, 669 aa, Homo sapien
  MISC_FEATURE (613)..(613): X=any amino acid
RRSQDPGCCLGPLPTMTSSGPGPRFLLLLPLLLPPAASASDRPRGRDPVNPEKLLVITVATAETEGYLRFLRSAEFFNYTVRTLGLGEEWRGGDVARTVGGGQKVRWLKKEMEKYADREDMIIMFVDSYDVILAGSPTELLKKFVQSGSRLLFSAESFCWPEWGLAEQYPEVGTGKRFLNSGGFIGFATTIHQIVRQWKYKDDDDDQLFYTRLYLDPGLREKLSLNLDHKSRIFQNLNGALDEVVLKFDRNRVRIRNVAYDTLPIVVHGNGPTKLQLNYLGNYVPNGWTPEGGCGFCNQDRRTLPGGQPPPRVFLAVFVEQPTPFLPRFLQRLLLLDYPPDRVTLFLHNNEVFHEPHIADSWPQLQDHFSAVKLVGPEEALSPGEARDMAMDLCRQDPECEFYFSLDADAVLTNLQTLRILIEENRKVIAPMLSRHGKLWSNFWGALSPDEYYARSEDYVELVQRKRVGVWNVPYISQAYVIRGDTLRMELPQRDVFSGSDTDPDMAFCKSFRDKGIFLHLSNQHEFGRLLATSRYDTEHLHPDLWQIFDNPVDWKEQYIHENYSRALEGEGIVEQPCPDVYWFPLLSEQMCDELVAEMEHYGQWSGGRHEWXGTNGAGPHMKGGPGQVIGSLADNLAATGGGKGPAKSGPNHQHRARGQTGTPKGDTG

SEQ ID NO: 146 - protein, 411 aa, Homo sapien
MQGPYVQGLGYPEGRRTSRDELGRIWGAVLPADRGVGASRGGVWNVPYISQAYVIRGDTLRMELPQRDVFSGSDTDPDMAFCKSFRDKVSAGARSGLGAVPQTPGIACITDTPTPLTGIFLHLSNQHEFGRLLATSRYDTEHLHPDLWQIFDNPVVSGDPSPEHTGSPPCAKEDTKRDGCCQRRTLSGRGRSPGGWERGGHRSDVPPTLSQDWKEQYIHENYSRALEGEGIVEQPCPDVYWFPLLSEQMCDELVAEMEHYGQWSGGRHEDSRLAGGYENVPTVDIHMKQVGYEDQWLQLLRTYVGPMTESLFPGYHTKARAVMNFVVRYRPDEQPSLRPHHDSSTFTLNVALNHKGLDYEGGGCRFLRYDCVISSPRKGWALLHPGRLTHYHEGLPTTWGTRYIMVSFVDP

SEQ ID NO: 147 - protein, 255 aa, Homo sapien
VGTPRPEHTGSPPCAKEDTKRDGCCQRRTLSGRGRSPGGWERGGHRSDVPPTLSQDWKEQYIHENYSRALEGEGIVEQPCPDVYWFPLLSEQMCDELVAEMEHYGQWSGGRHEDSRLAGGYENVPTVDIHMKQVGYEDQWLQLLRTYVGPMTESLFPGYHTKARAVMNFVVRYRPDEQPSLRPHHDSSTFTLNVALNHKGLDYEGGGCRFLRYDCVISSPRKGWALLHPGRLTHYHEGLPTTWGTRYIMVSFVDP

SEQ ID NO: 148 - protein, 312 aa, Homo sapien
MRSPELALPRGMQPTEFFQSLGGDGERNVQIEMAHGTTTLAFKFQHGVIAAVDSRASAGSYISALRVNKVIEINPYLLGTMSGCAADCQYWERLLAKECRLYYLRNGERISVSAASKLLSNMMCQYRGMGLSMGSMICGWDKKGPGLYYVDEHGTRLSGNMFSTGSGNTYAYGVMDSGYRPNLSPEEAYDLGRRAIAYATHRDSYSGGVVNMSTVSSWSGPLERPMSCPVCPSGSASIAAGAGGRPGRTCGPPGHTLSPGKKGVVCQQKVVSTSGKHMGRYKSRVCAAKMIIIGGGSTPYPYNGSRVHTSYY

SEQ ID NO: 149 - protein, 299 aa, Homo sapien
LSFSRKRQGDVEKSLVPSPSICGFRFHFLLRERTDLWVLGGHGATRCMRSPRGQRPESALPVAGSGRRSDPGHYSFSMRSPELALPRGMQPTEFFQSLGGDGERNVQIEMAHGTTTLAFKFQHGVIAAVDSRASAGSYISALRVNKVIEINPYLLGTMSGCAADCQYWERLLAKECRLYYLRNGERISVSAASKLLSNMMCQYRGMGLSMGSMICGWDKKGPGLYYVDEHGTRLSGNMFSTGSGNTYAYGVMDSGYRPNLSPEEAYDLGRRAIAYATHRDSYSGGVVNMSTVSSWSRAT

SEQ ID NO: 150 - protein, 274 aa, Homo sapien
MRSPELALPRGMQPTEFFQSLGGDGERNVQIEMAHGTTTLAFKFQHGVIAAVDSRASAGSYISALRVNKVIEINPYLLGTMSGCAADCQYWERLLAKECRLYYLRNGERISVSAASKLLSNMMCQYRGMGLSMGSMICGWDKKGPGLYYVDEHGTRLSGNMFSTGSGNTYAYGVMDSGYRPNLSPEEAYDLGRRAIAYATHRDSYSGGVVNIPEDGGDSERPFGRASRDHQGGGGRPRGGSGTPFRKSRKVSRGGCLNQWPKKGPAAYWRSSTY

SEQ ID NO: 151 - protein, 294 aa, Homo sapien
LSFSRKRQGDVEKSLVPSPSICGFRFHFLLRERTDLWVLGGHGATRCMRSPRGQRPESALPVAGSGRRSDPGHYSFSMRSPELALPRGMQPTEFFQSLGGDGERNVQIEMAHGTTTLAFKFQHGVIAAVDSRASAGSYISALRVNKVIEINPYLLGTMSGCAADCQYWERLLAKECRLYYLRNGERISVSAASKLLSNMMCQYRGMGLSMGSMICGWDKKGPGLYYVDEHGTRLSGNMFSTGSGNTYAYGVMDSGYRPNLSPEEAYDLGRRAIAYATHRDSYSGGVVNIPEEWW

SEQ ID NO: 152 - protein, 237 aa, Homo sapien
MRSPELALPRGMQPTEFFQSLGGDGERNVQIEMAHGTTTLAFKFQHGVIAAVDSRASAGSYISALRVNKVIEINPYLLGTMSGCAADCQYWERLLAKECRLYYLRNGERISVSAASKLLSNMMCQYRGMGLSMGSMICGWDKKGPGLYYVDEHGTRLSGNMFSTGSGNTYAYGVMDSGYRPNLSPEEAYDLGRRAIAYATHRDSYSGGVVNMYHIDTTMVGESKVDVDLCPPEAQSG

SEQ ID NO: 153 - protein, 297 aa, Homo sapien
  MISC_FEATURE (297)..(297): X=any amino acid
LSFSRKRQGDVEKSLVPSPSICGFRFHFLLRERTDLWVLGGHGATRCMRSPRGQRPESALPVAGSGRRSDPGHYSFSMRSPELALPRGMQPTEFFQSLGGDGERNVQIEMAHGTTTLAFKFQHGVIAAVDSRASAGSYISALRVNKVIEINPYLLGTMSGCAADCQYWERLLAKECRLYYLRNGERISVSAASKLLSNMMCQYRGMGLSMGSMICGWDKKGPGLYYVDEHGTRLSGNMFSTGSGNTYAYGVMDSGYRPNLSPEEAYDLGRRAIAYATHRDSYSGGVVNMYHIERDGX

SEQ ID NO: 154 - protein, 260 aa, Homo sapien
MDSSLPNAQHDVQGLSPQENLSPPSFPTSSHPQVCQKSGEISLLKQQLKESQAELVQKGSELVALRVALREARATLRVSEGRARGLQEAARARELELEACSQELQRHRQEAEQLREKAGQLDAEAAGLREPPVPPATADPFLLAESDEAKVQRAAAGVGGSLRAQVERLRVELQRERRRGEEQRDSFEGERLAWQAEKEQVIRYQKQLQHNYIQMYRRNRQLEQELQQLSLELEARELADLGLAEQAPCICLEEITATEI

SEQ ID NO: 155 - protein, 249 aa, Homo sapien
CAGPVPPGEPVSPSFPTSSHPQVCQKSGEISLLKQQLKESQAELVQKGSELVALRVALREARATLRVSEGRARGLQEAARARELELEACSQELQRHRQEAEQLREKAGQLDAEAAGLREPPVPPATADPFLLAESDEAKVQRAAAGVGGSLRAQVERLRVELQRERRRGEEQRDSFEGERLAWQAEKEQVIRYQKQLQHNYIQMYRRNRQLEQELQQLSLELEARELADLGLAEQAPCICLEEITATEI

SEQ ID NO: 156 - protein, 132 aa, Homo sapien
MRGSHLPQPQTHFSKWSLHLPLLLFRAPRAGAGLAGPGFPDSWLWLPGCVALRARLCGTLDLWALGSVGLGGPGSLGPAGCPLVGLTLGPLRVFVSFGSLSFSEPVSFLQFSLSPCSLKWGNATEVPAPLAP

SEQ ID NO: 157 - protein, 225 aa, Homo sapien
  MISC_FEATURE (23)..(23): X=any amino acid
AWSSAAEVRGAGSGRRPGEPPTXARWNPAGGTAFPSRPHFLEGGLDSGEWVRGSWLPAAEWELVIADLTPLDWSLEFGWEGDFPQLFRSVSGPEPAPALCSPQPTKRGVLLGQSDCSGSAGENEGFPSPTATNAFLKMEPPLAPPSLSGSKSGSRPGWAWLSRLLALAPWMCGSQGPALWHFGLMGPRLRGVGGPWLTGSRWLSPCRPDPRASPSLCLFWVPVFL

SEQ ID NO: 158 - protein, 451 aa, Homo sapien
ASATMAIVQTLPVPLEPAPEAATAPQAPVMGSVSSLISGRPCPGGPAPPRHHGPPGPTFFRQQDGLLRGGYEAQEPLCPAVPPRKAVPVTSFTYINEDFRTESPPSPSSDVEDAREQRAHNAHLRGPPPKLIPVSGKLEKNMEKILIRPTAFKPVLPKPRGAPSLPSFMGPRATGLSGSQGSLTQLFGGPASSSSSSSSSSAADKPLAFSGWASGCPSGTLSDSGRNSLSSLPTYSTGGAEPTTSSPGGHLPSHGSGRGALPGPARGVPTGPSHSDSGRSSSSKSTGSLGGRVAGGLLGSGTRASPDSSSCGERSPPPPPPPPSDEALLHCVLEGKLRDREAELQQLRDSLDENEATMCQAYEERQRHWQREREALREDCAAQAQRAQRAQQLLQLQVFQLQQEKRQLQDDFAQLLQEREQLERRCATLERERRRGEEQRDSFEGERDHCY

SEQ ID NO: 159 - protein, 1193 aa, Homo sapien
MERHQPRLHHPAQGSAAGTPYPSSASLRGCRESKMPRRKGPQHPPPPSGPEEPGEKRPKFHLNIRTLTDDMLDKFASIRIPGSKKERPPLPNLKTAFASSDCSAAPLEMMENFPKPLSENELLELFEKMMEDMNLNEDKKAPLREKDFSIKKEMVMQYINTASKTGSLKRSRQISPQEFIHELKMGSADERLVTCLESLRVSLTSNPVSWVESFGHEGLGLLLDILEKLISGKIQEKVVKKNQHKVIQCLKALMNTQYGLERIMSEERSLSLLAKAVDPRHPNMMTDVVKLLSAVCIVGEESILEEVLEALTSAGEEKKIDRFFCIVEGLRHNSVQLQVACMQLINALVTSPDDLDFRLHIRNEFMRCGLKEILPNLKCIKNDGLDIQLKVFDEHKEEDLFELSHRLEDIRAELDEAYDVYNMVWSTVKETRAEGYFISILQHLLLIRNDYFIRQQYFKLIDECVSQIVLHRDGMDPDFTYRKRLDLDLTQFVDICIDQAKLEEFEEKASELYKKFEKEFTDHQETQAELQKKEAKINELQAELQAFKSQFGALPADCNIPLPPSKEGGTGHSALPPPPPLPSGGGVPPPPPPPPPPPLPGMRMPFSGPVPPPPPLGFLGGQNSPPLPILPFGLKPKKEFKPEISMRRLNWLKIRPHEMTENCFWIKVNENKYENVDLLCKLENTFCCQQKERREEEDIEEKKSIKKKIKELKFLDSKIAQNLSIFLSSFRVPYEEIRMMILEVDETRLAESMIQNLIKHLPDQEQLNSLSQFKSEYSNLCEPEQFVVVMSNVKRLRPRLSAILFKLQFEEQVNNIKPDIMAVSTACEEIKKSKSFSKLLELVLLMGNYMNAGSRNAQTFGFNLSSLCKLKDTKSADQKTTLLHFLVEICEEKYPDILNFVDDLEPLDKASKVSVETLEKNLRQMGRQLQQLEKELETFPPPEDLHDKFVTKMSRFVISAKEQYETLSKLHENMEKLYQSIIGYYAIDVKKVSVEDFLTDLNNFRTTFMQAIKENIKKREAEEKEKRVRIAKELAERERLERQQKKKRLLEMKTEGDETGVMDNLLEALQSGAAFRDRRKRTPMPKDVRQSLSPMSQRPVLKVCNHENQKVQLTEGSRSHYNINCNSTRTPVAKELNYNLDTHTSTGRIKAAEKKEACNVESNRKKETELLGSFSKNESVPEVEALLARLRAL

SEQ ID NO: 160 - protein, 650 aa, Homo sapien
MSLADELLADLEEAAEEEEGGSYGEEEEEPAIEDVQEETQLDLSGDSVKTIAKLWDSKMFAEIMMKIEEYISKQAKASEVMGPVEAAPEYRVIVDANNLTVEIENELNIIHKFIRDKYSKRFPELESLVPNALDYIRTVKELGNSLDKCKNNENLQQILTNATIMVVSVTASTTQGQQLSEEELERLEEACDMALELNASKHRIYEYVESRMSFIAPNLSIIIGASTAAKIMGVAGGLTNLSKMPACNIMLLGAQRKTLSGFSSTSVLPHTGYIYHSDIVQSLPPDLRRKAARLVAAKCTLAARVDSFHESTEGKVGYELKDEIERKFDKWQEPPPVKQVKPLPAPLDGQRKKRGGRSVRGPGGPVGMGVMEGRSRRPPPSRLPGAAHPPVPVPQDEGAAGADGDPEAGQPYELRRGQTPRAPSSTPQPASRHRPLPPATAPPLVLWPWLMSRALPQPPPPRPLFSFPSIQPQSDPRGPWSLCLRCLEPPRLPIAPGSLAGSSLPRGSLVPCCTAAPSLGPASLLCYPSVIPLVLQDRTQRPPHPIKPVLVPDIPRPTRIEEDAYQEDLGFSLGHLGKSGSGRVRQTQVNEATKARISKTLQRTLQKQSVVYGGKSTIRDRSSGTASSVAFTPLQGPGDCEPTGGREEGG

SEQ ID NO: 161 - protein, 369 aa, Homo sapien
KQWCAERRGLGMSLADELLADLEEAAEEEEGGSYGEEEEEPAIEDVQEETQLDLSGDSVKTIAKLWDSKMFAEIMMKIEEYISKQAKASEVMGPVEAAPEYRVIVDANNLTVEIENELNIIHKFIRDKYSKRFPELESLVPNALDYIRTVKELGNSLDKCKNNENLQQILTNATIMVVSVTASTTQGQQLSEEELERLEEACDMALELNASKHRIYEYVESRMSFIAPNLSIIIGASTAAKIMGVAGGLTNLSKMPACNIMLLGAQRKTLSGFSSTSVLPHTGYIYHSDIVQSLPPDLRRKAARLVAAKCTLAARVDSFHESTEGKVGYELKDEIERKFDKWQEPPPVKQVKPLPAPLDGQRKKRGGRR

SEQ ID NO: 162 - protein, 164 aa, Homo sapien
RRPYAGTRLPVGSPGLFLNAAAATPRTPSVTGATETVTPSEAPVLAAEPEADKGTVLALTENNFDDTIAEGITFIKFYAPWCGHCKTLAPTWEELSKKEFPGLAGVKIAEVDCTAERNICSKYSVRGYPTLLLFRGGKKVSEHSGGRDLDSLHRFVLSQAKDEL

SEQ ID NO: 163 - protein, 31 aa, Homo sapien
TDQHSIESTVTLRSEERQYCHKATFPELVGR

SEQ ID NO: 164 - protein, 110 aa, Homo sapien
PLCIQHSSPTSHTQGDVDTWPKVTGGRNLRNKTTYTVCLRQKITAASRPASALKEIFINHVWFTDNSFFKKTQPPREAQLSRVLYTQLQLCITSLVFQENQSGTICLFTL

SEQ ID NO: 165 - protein, 39 aa, Homo sapien
MVTLEFPYERRDVKTKDRCQWAALALVCTAVAAVDASVL

SEQ ID NO: 166 - protein, 110 aa, Homo sapien; identical to SEQ ID NO: 164

SEQ ID NO: 167 - protein, 140 aa, Homo sapien
MVGRRALIVLAHSERTSFNYAMKEAAAAALKKKGWEVVESDLYAMNFNPIISRKDITGKLKDPANFQYPAESVLAYKEGHLSPDIVAEQKKLEAADLVIFQVWGDIGRGVRDICVLIVLDMYLISYEILNSYPLYCILCK

SEQ ID NO: 168 - protein, 73 aa, Homo sapien
FESVPCKGEYETCNSDNLNHAVLAVGYGIQKGNKHWIIKNSWGENWGNKGYILMARNKNNACGIANLASFPKM

SEQ ID NO: 169 - protein, 72 aa, Homo sapien
SSRYPQGEYETCNSDNLNHAVLAVGYGIQKGNKHWIIKNSWGENWGNKGYILMARNKNNACGIANLASFPKM

SEQ ID NO: 170 - protein, 321 aa, Homo sapien
FVSLCSGSSSCRSLLFFFRFVLIRWSFPLLSSSFSSSLFVVLFRRCGLVRFSRSVLASVLLALLLLSSCVRFPVACLSFSLLLVICFSLFLLFLSPVSPSFLVSSSPFLLFACACLARSVFFCLCFCRVRLSLVFFGLLFLFSPLRSLLFSVLRASVPFVFFVFFASFRSLRSSSSVPLLSSFLPLSPFLLLWLPSLAVLPLRLPLLPSVVSRCCSCVLLCVLVLFWFLVGGCVVCALCVLFVVFVRSWCTAEKSHHQRTSFNRLIVGASPEGLRAGRSGGCSRLLFFAPWALSKRSRYLALEGTLAPPFFFCMSTFAFIE

SEQ ID NO: 171 - protein, 320 aa, Homo sapien
RLALFWFFLVSVVIVLLPLRSHSLVLSLALFLLFLLPLRGSLPALWSCSFLSVCPGFRLVGSSPSVFLRPVSCCLSVFLASARHLFLLVLAFSLSGLAFFPCLLLPFSSLCVCLSRSLCVLLSLLLSCPLVSCLLRLAFSLLSSPFAAVFCSPCLCPFCLLRLLRFLPFPPLLFLRSSPLVVPPALPFRCCSGFPRWPSSLFASLSFPLSFLVVVLVCCCVCSCCSGSWLVVVWCVRCVCCLLCLCARGVLLRSHTTSVRRLTGYRGRIPRGSPSRAVRRLFPPSFFCSLGPVQTVPYLALEGTLAPPFFFCMSTFAFIE

SEQ ID NO: 172 - protein, 320 aa, Homo sapien; identical to SEQ ID NO: 171

SEQ ID NO: 173 - protein, 684 aa, Homo sapien
MEENLISMREDHSFHVRYRMEASCLELALEGERLCKSGDCRAGVSFFEAAVQVGTEDLKTLSAIYSQLGNAYFYLHDYAKALEYHHHDLTLARTIGDQLGEAKASGNLGNTLKVLGNFDEAIVCCQRHLDISRELNDKVGEARALYNLGNVYHAKGKSFGCPGPQDVGEFPEEVRDALQAAVDFYEENLSLVTALGDRAAQGRAFGNLGNTHYLLGNFRDAVIAHEQRLLIAKEFGDKAAERRAYSNLGNAYIFLGEFETASEYYKKTLLLARQLKDRAVEAQSCYSLGNTYTLLQDYEKAIDYHLKHLAIAQELNDRIGEGRACWSLGNAYTALGNHDQAMHFAEKHLEISREVGDKSGELTARLNLSDLQMVLGLSYSTNNSIMSENTEIDSSLNGVRPKLGRRHSMENMELMKLTPEKVQNWNSEILAKQKPLIAKPSAKLLFVNRLKGKKYKTNSSTKVLQDASNSIDHRIPNSQRKISADTIGDEGFFDLLSRFQSNRMDDQRCCLQEKNCHTASTTTSSTPPKMMLKTSSVPVVSPNTDEFLDLLASSQSRRLDDQRASFSNLPGLRLTQNSQSVLSHLMTNDNKEADEDFFDILVKCQGSRLDDQRCAPPPATTKGPTVPDEDFFSLILRSQGKRMDEQRVLLQRDQNRDTDFGLKDFLQNNALLEFKNSGKKSADH

SEQ ID NO: 174 - protein, 499 aa, Homo sapien
MSGHSPTRGAMQVAMNGKARKEAVQTAAKELLKFVNRSPSPFHAVAECRNRLLQAGFSELKETEKWNIKPESKYFMTRNSSTIIAFAVGGQYVPGNGFSLIGAHTDSPCLRVKRRSRRSQVGFQQVGVETYGGGIWSTWFDRDLTLAGRVIVKCPTSGRLEQQLVHVERPILRIPHLAIHLQRNINENFGPNTEMHLVPILATAIQEELEKGTPEPGPLNAVDERHHSVLMSLLCAHLGLSPKDIVEMELCLADTQPAVLGGAYDEFIFAPRLDNLHSCFCALQALIDSCAGPGSLATEPHVRMVTLYDNEEVGSESAQGAQSLLTELVLRRISASCQHPTAFEEAIPKSFMISADMAHAVHPNYLDKHEENHRPLFHKGPVIKVAKAPTCRPYGLLQPFGDAIKTLHQRALKPANLPSTFKSTADLAFNIVLLLKPPSIAEPRVNYTKVYLLRPLRAGTHPCQGGTAAVAGDAPHSSPILSATRAAQKHKQQGARRRM

SEQ ID NO: 175 - protein, 407 aa, Homo sapien
GAGQAARWGRAEPGGQMSGHSPTRGAMQVAMNGKARKEAVQTAAKELLKFVNRSPSPFHAVAECRNRLLQAGFSELKETEKWNIKPESKYFMTRNSSTIIAFAVGGQYVPGNGFSLIGAHTDSPCLRVKRRSRRSQVGFQQVGVETYGGGIWSTWFDRDLTLAGRVIVKCPTSGRLEQQLVHVERPILRIPHLAIHLQRNINENFGPNTEMHLVPILATAIQEELEKGTPEPGPLNAVDERHHSVLMSLLCAHLGLSPKDIVEMELCLADTQPAVLGGAYDEFIFAPRLDNLHSCFCALQALIDSCAGPGSLATEPHVRMVTLYDNEEVGSESAQGAQSLLTELVLRRISASCQHPTAFEEAIPKSFMISADMAHAVHPNYLDKHEENHRPLFHKGPVIKVAKAPTL

SEQ ID NO: 176 - protein, 31 aa, Homo sapien
MHLITDDEAPYRTPPPSNAHVQRSINALIDY

SEQ ID NO: 177 - protein, 69 aa, Homo sapien
GTANCNPVPASVNEVIFIFPSIHMFIYYLYGCFPTKWQSWAVAIDTIWAAKPKIFSIWPFTEKVCLPLS

SEQ ID NO: 178 - protein, 89 aa, Homo sapien
TSTAQCAGIRLSSGARAGTVNNDEGEWSGPPPECRGKSLTSKVPPTVQKPTTVNVPTTEVSPTSQKTTTKTTTPNAQATRSTSAATTLS

SEQ ID NO: 179 - protein, 86 aa, Homo sapien
YGAVCGIRFRAAPGSTVNNDEGEWSGPPPECRGKSLTSKVPPTVQKPTTVNVPTTEVSPTSQKTTTKTTTPNAQATRSTSAATTLS

SEQ ID NO: 180 - protein, 404 aa, Homo sapien
MLKTASAALTWGLGPDPAWSHPAQKTGPPVPVTHCSYGARGFWCWGPPCRWGRRRSRSCREDQKPVMDDQRDLISNNEQLPMLGRRPGAPESKCSRGALYTGFSILVTLLLAGQATTAYFLYQQQGRLDKLTVTSQNLQLENLRMKLPKPPKPVSKMRMATPLLMQALPMGALPQGPMQNATKYGNMTEDHVMHLLQNADPLKVYPPLKGSFPENLRHLKNTMETIDWKVFESWMHHWLLFEMSRHSLEQKPTDAPPKVLTKCQEEVSHIPAVHPGSFRPKCDENGNYLPLQCYGSIGYCWCVFPNGTEVPNTRSRGHHNCSGKQWHCASVRGPGRTRKVEGQEVPSEAHGTRTPRMAAPGGSDVVMRPALYPSTHLCIPICPFIISPLTCTHICSLIRQSFHL

SEQ ID NO: 181 - protein, 371 aa, Homo sapien
LTAVMVPAASGVGDLRAVGGRRSRSCREDQKPVMDDQRDLISNNEQLPMLGRRPGAPESKCSRGALYTGFSILVTLLLAGQATTAYFLYQQQGRLDKLTVTSQNLQLENLRMKLPKPPKPVSKMRMATPLLMQALPMGALPQGPMQNATKYGNMTEDHVMHLLQNADPLKVYPPLKGSFPENLRHLKNTMETIDWKVFESWMHHWLLFEMSRHSLEQKPTDAPPKVLTKCQEEVSHIPAVHPGSFRPKCDENGNYLPLQCYGSIGYCWCVFPNGTEVPNTRSRGHHNCSGKQWHCASVRGPGRTRKVEGQEVPSEAHGTRTPRMAAPGGSDVVMRPALYPSTHLCIPICPFIISPLTCTHICSLIRQSFHL

SEQ ID NO: 182 - protein, 102 aa, Homo sapien
ILHGPLGQGSHGQRLHQNADPLKVYPPLKGSFPENLRHLKNTMETIDWKVFESWMHHWLLFEMSRHSLEQKPTDAPPKESLELEDPSSGLGVTKQDLGPVPM

SEQ ID NO: 183 - protein, 102 aa, Homo sapien
EQQRRSSTSCQPHTATAFLLPSAPSPSPISHPVPHPMRPWCLALSSPLDKTNQVGTADNNAARPCCPISICQQGREVPGSGQKLDRSPFLTSQQPPTQGSKT

SEQ ID NO: 184 - protein, 273 aa, Homo sapien
MEGVLCPAGWWLRPQACAQGRWQHSEATSTAELAVEIVYVVPSVAESLPAPHWLSTQGFQNLEKGAVFWSWSCGVPCASMGWVCAQAALPWKCGCGYGLGVWDPRQPKWEQGRPVGKGGSGLVGSAAPRCPFSVQRGSDELFSTCVTNGPFIMSSNSASAANGNDSKKFKGDSRSAGVPSRVIHIRKLPIDVTEGEVISLGLPFGKVTNLLMLKGKNQAFIEMNTEEAANTMVNYYTSVTPVLRGQPIYIQFLCALSTAPASCPGGSPRIPFP

SEQ ID NO: 185 - protein, 227 aa, Homo sapien
EPPSPTLAEYPGLPEFGKRSSVLVVELWGAVRVHGLGLRSGCPAVEVWVWVWVGGLGPQAAQVGAGPAGGEGRLWPGGKCSSALSLLLQRGSDELFSTCVTNGPFIMSSNSASAANGNDSKKFKGDSRSAGVPSRVIHIRKLPIDVTEGEVISLGLPFGKVTNLLMLKGKNQAFIEMNTEEAANTMVNYYTSVTPVLRGQPIYIQFLCALSTAPASCPGGSPRIPFP

SEQ ID NO: 186 - protein, 452 aa, Homo sapien
MKAWFFPFSIRRLVTFPKGSPREMTSPSVTSMGLFRRLHSVPRGSALCAMDGIVPDIAVGTKRGSDELFSTCVTNGPFIMSSNSASAANGNDSKKFKGDSRSAGVPSRVIHIRKLPIDVTEGEVISLGLPFGKVTNLLMLKGKNQVPEPRFSGVLITVQAGTRRAQRSLPPQQAFIEMNTEEAANTMVNYYTSVTPVLRGQPIYIQFSNHKELKTDSSPNQARAQAALQAVNSVQSGNLALAASAAAVDAGMAMAGQSPVLRIIVENLFYPVTLDVLHQIFSKFGTVLKIITFTKNNQFQALLQYADPVSAQHAKLSLDGQNIYNACCTLRIDFSKLTSLNVKYNNDKSRDYTRPDLPSGDSQPSLDQTMAAAFASPYAGAGFPPTFAIPQAAGYSNAWSWFPSDCMPTPPSQAAPHPRRQPGRTGHSSARSGALPGRGDATSTEQAWPGQW

SEQ ID NO: 187 - protein, 304 aa, Homo sapien
AAFLRGAHTVQAGTRRAQRSLPPQQAFIEMNTEEAANTMVNYYTSVTPVLRGQPIYIQFSNHKELKTDSSPNQARAQAALQAVNSVQSGNLALAASAAAVDAGMAMAGQSPVLRIIVENLFYPVTLDVLHQIFSKFGTVLKIITFTKNNQFQALLQYADPVSAQHAKLSLDGQNIYNACCTLRIDFSKLTSLNVKYNNDKSRDYTRPDLPSGDSQPSLDQTMAAAFASPYAGAGFPPTFAIPQAAGYSNAWSWFPSDCMPTPPSQAAPHPRRQPGRTGHSSARSGALPGRGDATSTEQAWPGQW

SEQ ID NO: 188 - protein, 606 aa, Homo sapien
MKAWFFPFSIRRLVTFPKGSPREMTSPSVTSMGLFRRLHSVPRGSALCAMDGIVPDIAVGTKRGSDELFSTCVTNGPFIMSSNSASAANGNDSKKFKGDSRSAGVPSRVIHIRKLPIDVTEGEVISLGLPFGKVTNLLMLKGKNQVPEPRFSGVLTPCRRGRGGPSAHCLPNEAFIEMNTEEAANTMVNYYTSVTPVLRGQPIYIQFSNHKELKTDSSPNQARAQAALQAVNSVQSGNLALAASAAAVDAGMAMAGQSPVLRIIVENLFYPVTLDVLHQIFSKFGTVLKIITFTKNNQFQALLQYADPVSAQHAKLSLDGQNIYNACCTLRIDFSKLTSLNVKYNNDKSRDYTRPDLPSGDSQPSLDQTMAAAFGYRGCPTRRQCAEWSIRAAQSGAPAARARPCTRVMHLLLSARPAQHGPVSPTSGPRPPLEQRICPRRLCRGRPPAGLGPIPQHSARSLVEVVGAMISVSFISRCTWYNLSLSVCRSWFPSHLCHSSSCRVFKRLVLVPQRLHAHTTFPGSSASTAAAWADWALECQVRGPSRERGRHVHRAGLARAVVGQGCGGPRVDGASQKPLIAQSLWSGSLQAPPGEREDRQWLEGCL

SEQ ID NO: 189 - protein, 227 aa, Homo sapien
AAFLRGAHTVQAGTRRAQRSLPPQQAFIEMNTEEAANTMVNYYTSVTPVLRGQPIYIQFSNHKELKTDSSPNQARAQAALQAVNSVQSGNLALAASAAAVDAGMAMAGQSPVLRIIVENLFYPVTLDVLHQIFSKFGTVLKIITFTKNNQFQALLQYADPVSAQHAKLSLDGQNIYNACCTLRIDFSKLTSLNVKYNNDKSRDYTRPDLPSGDSQPSLDQTMAAAFG

SEQ ID NO: 190 - protein, 432 aa, Homo sapien
MKAWFFPFSIRRLVTFPKGSPREMTSPSVTSMGLFRRLHSVPRGSALCAMDGIVPDIAVGTKRGSDELFSTCVTNGPFIMSSNSASAANGNDSKKFKGDSRSAGVPSRVIHIRKLPIDVTEGEVISLGLPFGKVTNLLMLKGKNQVPEPRFSGVLITVQAGTRRAQRSLPPQQAFIEMNTEEAANTMVNYYTSVTPVLRGQPIYIQFSNHKELKTDSSPNQARAQAALQAVNSVQSGNLALAASAAAVDAGMAMAGQSPVLRIIVENLFYPVTLDVLHQIFSKFGTVLKIITFTKNNQFQALLQYADPVSAQHAKLSLDGQNIYNACCTLRIDFSKLTSLNVKYNNDKSRDYTRPDLPSGDSQPSLDQTMAAAFGLSVPNVHGALAPLAIPSAAAAAAAAGRIAIPGLAGAGNSVLLVSNLNPEASTVTCSA

SEQ ID NO: 191 - protein, 284 aa, Homo sapien
AAFLRGAHTVQAGTRRAQRSLPPQQAFIEMNTEEAANTMVNYYTSVTPVLRGQPIYIQFSNHKELKTDSSPNQARAQAALQAVNSVQSGNLALAASAAAVDAGMAMAGQSPVLRIIVENLFYPVTLDVLHQIFSKFGTVLKIITFTKNNQFQALLQYADPVSAQHAKLSLDGQNIYNACCTLRIDFSKLTSLNVKYNNDKSRDYTRPDLPSGDSQPSLDQTMAAAFGLSVPNVHGALAPLAIPSAAAAAAAAGRIAIPGLAGAGNSVLLVSNLNPEASTVTCSA

SEQ ID NO: 192 - protein, 304 aa, Homo sapien; identical to SEQ ID NO: 187

SEQ ID NO: 193 - protein, 304 aa, Homo sapien; identical to SEQ ID NO: 187

SEQ ID NO: 194 - protein, 304 aa, Homo sapien; identical to SEQ ID NO: 187

SEQ ID NO: 195 - protein, 315 aa, Homo sapien
MRSVQAGLSSQESLSPVLSLSPDSMSFTTRSTFSTNYRSLGSVQAPSYGARPVSSAASVYAGAGGSGSRISVSRSTSFRGGMGSGGLATGIAGGLAGMGGIQNEKETMQSLNDRLASYLDRVRSLETENRRLESKIREHLEKKGPQVRDWSHYFKIIEDLRAQIFANTVDNARIVLQIDNARLAADDFRVKYETELAMRQSVENDIHGLRKVIDDTNITRLQLETEIEALKEELLFMKKNHEEDRTAATSPDASSGLPRRQNAPNTGTGRPGDSARDEWSRPRGEGRQNGEPRPKRSVNEPVERPGSDDSGHGGT

SEQ ID NO: 196 - protein, 296 aa, Homo sapien
  MISC_FEATURE (245)..(245): X=any amino acid
  MISC_FEATURE (250)..(251): X=any amino acid
  MISC_FEATURE (253)..(254): X=any amino acid
  MISC_FEATURE (257)..(258): X=any amino acid
HRSVQAGLSSQESLSPVLSLSPDSMSFTTRSTFSTNYRSLGSVQAPSYGARPVSSAASVYAGAGGSGSRISVSRSTSFRGGMGSGGLATGIAGGLAGMGGIQNEKETMQSLNDRLASYLDRVRSLETENRRLESKIREHLEKKGPQVRDWSHYFKIIEDLRAQIFANTVDNARIVLQIDNARLAADDFRVKYETELAMRQSVENDIHGLRKVIDDTNITRLQLETEIEALKEELLFMKKNHEEDXTGLQXXMXXLGXXEEMPPTPGLADQATRQETSGRDRGEKVARMGSHGPSGV

SEQ ID NO: 197 - protein, 267 aa, Homo sapien
MSFTTRSTFSTNYRSLGSVQAPSYGARPVSSAASVYAGAGGSGSRISVSRSTSFRGGMGSGGLATGIAGGLAGMGGIQNEKETMQSLNDRLASYLDRVRSLETENRRLESKIREHLEKKGPQVRDWSHYFKIIEDLRAQIFANTVDNARIVLQIDNARLAADDFRVKYETELAMRQSVENDIHGLRKVIDDTNITRLQLETEIEALKEELLFMKKNHEEEVKGLQAQIASSGVDRGGRCPQISGPRQDHGRHSGPNMTSWLGRTERS

SEQ ID NO: 198 - protein, 454 aa, Homo sapien
KAASRANNTCCPCPCPVGHPVSGGMSFTTRSTFSTNYRSLGSVQAPSYGARPVSSAASVYAGAGGSGSRISVSRSTSFRGGMGSGGLATGIAGGLAGMGGIQNEKETMQSLNDRLASYLDRVRSLETENRRLESKIREHLEKKGPQVRDWSHYFKIIEDLRAQIFANTVDNARIVLQIDNARLAADDFRVKYETELAMRQSVENDIHGLRKVIDDTNITRLQLETEIEALKEELLFMKKNHEEEVKGLQAQIASSGLTVEVDAPKSQDLAKIMADIRAQYDELARKNREELDKYWSQQIEESTTVVTTQSAEVGAAETTLTELRRTVQSLEIDLDSMRNLKASLENSLREVEARYALQMEQLNGILLHLESELAQTRAEGQRQAQEYEALLNIKVKLEAEIATYRRLLEDGEDFNLGDALDSSNSMQTIQKTTTRRIVDGKVVSETNDTKVLRH

SEQ ID NO: 199 - protein, 104 aa, Homo sapien
MLETKWSLLQQQKTARSNMDNMFESYINNLRRQLETLGQEKLKLEAELGNMQGLVEDFKNKSEQLPPSTQLKSPCSPPPLGTLGLSPHGPLLWAVQSYLIRVTT

SEQ ID NO: 200 - protein, 768 aa, Homo sapien
MGGAERGRAPAFLLRSAPVSAGGGGAYITCAAPLLREDVACSLAPGESPRLPRELGERNWRRSTPGGSALQHEPISSRSRSRRPGRGAASEDENGDDQGFQEGEDELGDEEEGAGDENGHGEQQPQPPATQQQQPQQQRGAAKEAAGKSSGPTSLFAVTVAPPGARQGQQQAGGDGKTEQKGGDKKRGVKRPREDHGRGYFEYIEENKYSRAKSPQPPVEEEDEHFDDTVVCLDTYNCDLHFKISRDRLSASSLTMESFAFLWAGGRASYGVSKGKVCFEMKVTEKIPVRHLYTKDIDIHEVRIGWSLTTSGMLLGEEEFSYGYSLKGIKTCNCETEDYGEKFDENDVITCFANFESDEVELSYAKNGQDLGVAFKISKEVLAGRPLFPHVLCHNCAVEFNFGQKEKPYFPIPEEYTFIQNVPLEDRVRGPKGPEEKKDCEVVMMIGLPGAGKTTWVTKHAAENPGKYNILGTNTIMDKMMVAGFKKQMADTGKLNTLLQRAPQCLGKFIEIAARKKRNFILDQTNVSAAAQRRKMCLFAGFQRKAVVVCPKDEDYKQRTQKKAEVEGKDLPEHAVLKMKGNFTLPEVAECFDEITYVELQKEEAQKLLEQYKEESKKALPPEKKQNTGSKKSNKNKSGKNQFNRGGGHRGRGGFNMRGGNFRGGAPGNRGGYNRRGNMPQRGGGGGGSGGIGYPYPRAPVFPGRGSYSNRGNYNRGGMPNRGNYNQNFRGRGNNRGYKNQSQGYNQWQQGQFWGQKPWSQHYHQGYY

SEQ ID NO: 201 - protein, 793 aa, Homo sapien
IGSALRGLHRALGPGSAWGRGGKYGNGRGRARARSGFPPAQCSRQRRGRGAYITCAAPLLREDVACSLAPGESPRLPRELGERNWRRSTPGGSALQHEPISSRSRSRRPGRGAASEDENGDDQGFQEGEDELGDEEEGAGDENGHGEQQPQPPATQQQQPQQQRGAAKEAAGKSSGPTSLFAVTVAPPGARQGQQQAGGDGKTEQKGGDKKRGVKRPREDHGRGYFEYIEENKYSRAKSPQPPVEEEDEHFDDTVVCLDTYNCDLHFKISRDRLSASSLTMESFAFLWAGGRASYGVSKGKVCFEMKVTEKIPVRHLYTKDIDIHEVRIGWSLTTSGMLLGEEEFSYGYSLKGIKTCNCETEDYGEKFDENDVITCFANFESDEVELSYAKNGQDLGVAFKISKEVLAGRPLFPHVLCHNCAVEFNFGQKEKPYFPIPEEYTFIQNVPLEDRVRGPKGPEEKKDCEVVMMIGLPGAGKTTWVTKHAAENPGKYNILGTNTIMDKMMVAGFKKQMADTGKLNTLLQRAPQCLGKFIEIAARKKRNFILDQTNVSAAAQRRKMCLFAGFQRKAVVVCPKDEDYKQRTQKKAEVEGKDLPEHAVLKMKGNFTLPEVAECFDEITYVELQKEEAQKLLEQYKEESKKALPPEKKQNTGSKKSNKNKSGKNQFNRGGGHRGRGGFNMRGGNFRGGAPGNRGGYNRRGNMPQRGGGGGGSGGIGYPYPRAPVFPGRGSYSNRGNYNRGGMPNRGNYNQNFRGRGNNRGYKNQSQGYNQWQQGQFWGQKPWSQHYHQGYY

SEQ ID NO: 202 - protein, 325 aa, Homo sapien
MIFRDFIFAQVISKYEDIFFVFFQVGCLKFFPFFIPLPKANEKKVDQPPEAKKPKIKVVNVELPIEANLVWQLGKDLLNMYIETEGKMIMQDKLEKERNDAKNAVEEYVYEFRDKLCGPYEKFICEQDHQNFLRLLTETEDWLYEEGEDQAKQAYVDKLEELMKIGTPVKVRFQEAEERPKMFEELGQRLQHYAKIAADFRNKDEKYNHIDESEMKKVEKSVNEVMEWMNNVMNAQAKKSLDQDPVVRAQEIKTKIKELNNTCEPVVTQPKPKIESPKLERTPNGPNIDKKEEDLEDKNNFGAEPPHQNGECYPNEKNSVNMDLD

SEQ ID NO: 203 - protein, 131 aa, Homo sapien
MKVQNRRNAHLSSFDRFAFLWEMQFRVTCCRRYVVDHLDIIAEDELLDQLLSHTASLSDLLQNSVVATAQTRLRSYSCASLRFSSATMSDKPDMAEIEKFDKSKLKKTETQEKNPLPSKETIEQEKQAGES

SEQ ID NO: 204 - protein, 116 aa, Homo sapien
SLRLPWEMQFRVTCCRRYVVDHLDIIAEDELLDQLLSHTASLSDLLQNSVVATAQTRLRSYSCASLRFSSATMSDKPDMAEIEKFDKSKLKKTETQEKNPLPSKETIEQEKQAGES

SEQ ID NO: 205 - protein, 63 aa, Homo sapien
MCLGVCSFRCSDMSRVSSFQWVRGLTDFRNEAAYAHAPQKSSPSPHSTQEVLLSSPVTSYWGG

SEQ ID NO: 206 - protein, 97 aa, Homo sapien
CVSEFVPSDVQICPEFLPSSGFVVSLTSGMKLHTLTLHRKVLQVPTRPRKSCCLHLSPATGEAEAGESLEPRRWRLLGAKPRSRHYTPAWQQSETPS

SEQ ID NO: 207 - protein, 163 aa, Homo sapien
MNGEYYQESNGPTDSYAAISQVDRLQSEPESIRKWREEQMERLEALDANSRKQEAEWKEKAIKELEEWYARQDEQLQKTKANNRAAEEAFVNDIDESSPGTEWERVARLCDFNPKSSKQAKDVFPPCAQSSSPSSRPLVLEAPVDLLVLPRGLRWVLGWPLLA

SEQ ID NO: 208 - protein, 283 aa, Homo sapien
RLGTRLGVAPLPVGTTAVAAGRGVGGSVGFCLTVGVRAVQLPAMAELDPFGAPAGAPGGPALGNGVAGAGEEDPAAAFLAQQESEIAGIENDEAFAILDGGAPGPQPHGEPPGGPDAVDGVMNGEYYQESNGPTDSYAAISQVDRLQSEPESIRKWREEQMERLEALDANSRKQEAEWKEKAIKELEEWYARQDEQLQKTKANNRAAEEAFVNDIDESSPGTEWERVARLCDFNPKSSKQAKDVSRMRSVLISLKQAAGAGGPVDLLVLPRGLRWVLGWPLLA

SEQ ID NO: 209 - protein, 222 aa, Homo sapien
MAELDPFGAPAGAPGGPALGNGVAGAGEEDPAAAFLAQQESEIAGIENDEAFAILDGAAPPGPSRTASRRGVRMQESNGPTDSYAAISQVDRLQSEPESIRKWREEQMERLEALDANSRKQEAEWKEKAIKELEEWYARQDEQLQKTKANNRAAEEAFVNDIDESSPGTEWERVARLCDFNPKSSKQAKDVFPPCAQSSSPSSRPRWCTEEPPCGNTTSAIS

SEQ ID NO: 210 - protein, 250 aa, Homo sapien
NRTRGALVLLSQSAPQRWLPGVVSVGRLVFVSPLVSVPFSCPPWLSWIRSAPLPAPLAVPRWGTEWPAPAKKTRLRPSWRSKRARLRASRTTRPSPSWTAAPPGPSRTASRRGVRMQESNGPTDSYAAISQVDRLQSEPESIRKWREEQMERLEALDANSRKQEAEWKEKAIKELEEWYARQDEQLQKTKANNRAAEEAFVNDIDESSPGTEWERVARLCDFNPKSSKQAKDVSRMRSVLISLKQAPLVH

SEQ ID NO: 211 - protein, 142 aa, Homo sapien
SSRSRAAARDLEPDAWGACPPLPVGTTAVAAGRGVGGSVGFCLTVGVRAVQLPAMAELDPFGAPAGAPGGPALGNGVAGAGEEDPAAAFLAQQESEIAGIENDEAFAILDGAAPPGPSRTASRRGVRMPILGSKKQSGKKRQ

SEQ ID NO: 212 - protein, 220 aa, Homo sapien
SSRSRAAARDLEPDAWGACPPLPVGTTAVAAGRGVGGSVGFCLTVGVRAVQLPAMAELDPFGAPAGAPGGPALGNGVAGAGEEDPAAAFLAQQESEIAGIENDEAFAILDGGAPGPQPHGEPPGGPDANSRKQEAEWKEKAIKELEEWYARQDEQLQKTKANNRAAEEAFVNDIDESSPGTEWERVARLCDFNPKSSKQAKDVSRMRSVLISLKQAPLVH

SEQ ID NO: 213 - protein, 111 aa, Homo sapien
MNGEYYQESNGPTDSYAAISQVDRLQSEPESIRKWREEQMERLEALDANSRKQEAEWKEKAIKELEEWYARQDEQLQKTKANNRVADEAFYKQPFADVIGYVQGSRRSLCK

SEQ ID NO: 214 - protein, 236 aa, Homo sapien
GFRFTRLPPGACPPLPVGTTAVAAGRGVGGSVGFCLTVGVRAVQLPAMAELDPFGAPAGAPGGPALGNGVAGAGEEDPAAAFLAQQESEIAGIENDEAFAILDGGAPGPQPHGEPPGGPDAVDGVMNGEYYQESNGPTDSYAAISQVDRLQSEPESIRKWREEQMERLEALDANSRKQEAEWKEKAIKELEEWYARQDEQLQKTKANNRVADEAFYKQPFADVIGYVQGSRRSLCK

SEQ ID NO: 215 - protein, 211 aa, Homo sapien
MNGEYYQESNGPTDSYAAISQVDRLQSEPESIRKWREEQMERLEALDANSRKQEAEWKEKAIKELEEWYARQDEQLQKTKANNRAAEEAFVNDIDESSPGTEWERVARLCDFNPKSSKQAKDVFPPCAQSSSPSSRPVGDEEHLWKTNLIFIYQGSLSMIYVEVLENLCSSVLLVGFSKGSGKRGRKGAKRWFKFGRKKKGLGCFVGLKFI

SEQ ID NO: 216 - protein, 263 aa, Homo sapien
  MISC_FEATURE (263)..(263): X=any amino acid
GFRFTRLPPGACPPLPVGTTAVAAGRGVGGSVGFCLTVGVRAVQLPAMAELDPFGAPAGAPGGPALGNGVAGAGEEDPAAAFLAQQESEIAGIENDEAFAILDGGAPGPQPHGEPPGGPDAVDGVMNGEYYQESNGPTDSYAAISQVDRLQSEPESIRKWREEQMERLEALDANSRKQEAEWKEKAIKELEEWYARQDEQLQKTKANNRAAEEAFVNDIDESSPGTEWERVARLCDFNPKSSKQAKDVSRMRSVLISLKQARX

SEQ ID NO: 217 - protein, 150 aa, Homo sapien
MNGEYYQESNGPTDSYAAISQVDRLQSEPESIRKWREEQMERLEALDANSRKQEAEWKEKAIKELEEWYARQDEQLQKTKANNRAAEEAFVNDIDESSPGTEWERVARLCDFNPKSSKRARCFPMAQTHSSRRPVCLRAPVEPTLIFIYQ

SEQ ID NO: 218 - protein, 269 aa, Homo sapien
GFRFTRLPPGACPPLPVGTTAVAAGRGVGGSVGFCLTVGVRAVQLPAMAELDPFGAPAGAPGGPALGNGVAGAGEEDPAAAFLAQQESEIAGIENDEAFAILDGGAPGPQPHGEPPGGPDAVDGVMNGEYYQESNGPTDSYAAISQVDRLQSEPESIRKWREEQMERLEALDANSRKQEAEWKEKAIKELEEWYARQDEQLQKTKANNRAAEEAFVNDIDESSPGTEWERVARLCDFNPKSSKRARCFPMAQSHSSRRPVCLRALWNLH

SEQ ID NO: 219 - protein, 152 aa, Homo sapien
MKALIVLGLVLLSVTVQGKVFERCELARTLKRLGMDGYRGISLANWMCLAKWESGYNTRATNYNAGDRSTDYGIFQINSRYWCNDGKTPGAVNACHLSCSALLQDNIADAVACAKRVVRDPQGIRAWVAWRNRCLSFFSSFCLSHIKGVGIK

SEQ ID NO: 220 - protein, 178 aa, Homo sapien
SEGGAWTPGSEPTGAQACEFEAPSHHPPPQVVYIACSFTTVWLIYSKFKATYDGNHDTFRVEFLVVPTAILAFLVNHDFTPLEILWTFSIYLESVAILPQLFMVSKTGEAETITSHYLFALGVYRTLYLFNWIWRYHFEGFFDLIAIVAGLVQTVLYCDFFYLYITKVLKGKKLSLPA

SEQ ID NO: 221 - protein, 183 aa, Homo sapien
LHPSGDPLDLLHLPGVSGHLAAAVHGEQDRRGGDHHQPLLVCARRLPHALSLQLDLALPFRGLLRPHRHCGRPGPDSPLLRFLLPLYHQSPKGEEVEFAGIAPVLSISLLGSSGRQRKAAEDEELSHPGVTFLRTHLLCSPSRLLPGFRGTVEDPGLGELRTWAVCSFLPFRQEKKIFPLFSF

SEQ ID NO: 222 - protein, 742 aa, Homo sapien
MADAGIRRVVPSDLYPLVLGFLRDNQLSEVANKFAKATGATQQDANASSLLDIYSFWLNRSAKVPERKLQANGPVAKKAKKKASSSDSEDSSEEEEEVQGPPAKKAAVPAKRVGLPPGKAAAKASESSSSEESSDDDDEEDQKKQPVQKGVKPQAKAAKAPPKKAKSSDSDSDSSSEDEPPKNQKPKITPVTVKAQTKAPPKPARAAPKIANGKAASSSSSSSSSSSSDDSEEEKAAATPKKVWTITSVRAEVTRAVMCVCLPSLAGLVGSAFSCGESIFFLMQTVPKKQVVAKAPVKAATTPTRKSSSSEDSSSDEEEEQKKPMKNKPGPYSSVPPPSAPPPKKSLGTQPPKKAVEKQQPVESSEDSSDESDSSSEEEKKPPTKAVVSKATTKPPPAKKAAESSSDSSDSDSSEDDEAPSKPAGTTKNSSNKPAVTTKSPAVKPAAAPKQPVGGGQKLLTRKADSSSSEEESSSSEEEKTKKMVATTKPKATAKAALSLPAKQAPQGSRDSSSDSDSSSSEEEEEKTSKSAVKKKPQKVAGGAAPSKPASAKKGKAESSNSSSSDDSSEEEEEKLKGKGSPRPQAPKANGTSALTAQNGKAAKNSEEEEEEKKKAAVVVSKSGSLKKRKQNEAAKEAETPQAKKIKLQTPNTFPKRKKGEKRASSPFRRVREEEIEVDSRVADNSFDAKRGAAGDWGERANQVLKFTKGKSFRHEKTKKKRGSYRGGSISVQVNSIKFDSE

SEQ ID NO: 223 - protein, 288 aa, Homo sapien
LSGHLLLKQSGPTQPERTAFLSNPQPLIFANLKHYQKQQSLPSLCSTSDPDTPLGAPSSSDSDSSSSEEEEEKTSKSAVKKKPQKVAGGAAPSKPASAKKGKAESSNSSSSDDSSEEEEEKLKGKGSPRPQAPKANGTSALTAQNGKAAKNSEEEEEEKKKAAVVVSKSGSLKKRKQNEAAKEAETPQAKKIKLQTPNTFPKRKKGEKRASSPFRRVREEEIEVDSRVADNSFDAKRGAAGDWGERANQVLKFTKGKSFRHEKTKKKRGSYRGGSISVQVNSIKFDSE

SEQ ID NO: 224 - protein, 265 aa, Homo sapien
SSAPDFANLKHYQKQQSLPSLCSTSDPDTPLGAPSSSDSDSSSSEEEEEKTSKSAVKKKPQKVAGGAAPSKPASAKKGKAESSNSSSSDDSSEEEEEKLKGKGSPRPQAPKANGTSALTAQNGKAAKNSEEEEEEKKKAAVVVSKSGSLKKRKQNEAAKEAETPQAKKIKLQTPNTFPKRKKGEKRASSPFRRVREEEIEVDSRVADNSFDAKRGAAGDWGERANQVLKFTKGKSFRHEKTKKKRGSYRGGSISVQVNSIKFDSE

SEQ ID NO: 225 - protein, 1276 aa, Homo sapien
MILVQILKQEWPKHWPTFISDIVGASRTSESLCQNNMVILKLLSEEVFDFSSGQITQVKSKHLKDSMCNEFSQIFQLCQFVMENSQNAPLVHATLETLLRFLNWIPLGYIFETKLISTLIYKFLNVPMFRNVSLKCLTEIAGVSVSQYEEQFVTLFTLTMMQLKQMLPLNTNIRLAYSNGKDDEQNFIQNLSLFLCTFLKEHDQLIEKRLNLRETLMEALHYMLLVSEVEETEIFKICLEYWNHLAAELYRESPFSTSASPLLSGSQHFDVPPRRQLYLPMLFKVTERLVECSSCCILWFLRSESKYFYICVNKLAIKREPNNFSMSVENQNMKGVESRTLILKSVVLLSVSTLVVISLGKFIATCQSTKPESRNETQETPVTEVGEKNHIKTHLNNYKAIFVELQWKKNFFFWRQGLALWLRLECSGVVIAHYNLELLDYKQFSCVSLPSNWLQAHTTMPEQILNFLVLLHLYLHSFFCCALSPSIFIVLEIGCHFVLLKLLSNSWPQQFFLPRPSGIVGIIGMNPYTWLACGFFGFVCFELSFYTNDFSDLTIFFLIDILLSMVRLLMVSRMAKPEEVLVVENDQGEVVREFMKDTDSINLYKNMRETLGKLINTVNLYLYKSILGWKYILGNVLVVSKYFLNVLLLINKILLIIAFETMFFFVVYLTHLDYVDTERIMTEKLHNQVNGTEWSWKNLNTLCWAIGSISGAMHEEDEKRFLVTVIKDLLGLCEQKRGKDNKAIIASNIMYIVGQYPRFLRAHWKFLKTVVNKLFEFMHETHDGVQDMACDTFIKIAQKCRRHFVQVQVGEVMPFIDEILNNINTIICDLQPQQVHTFYEAVGYMIGAQTDQTVQEHLIEKYMLLPNQVWDSIIQQATKNVDILKDPETVKQLGSILKTNVRACKAVGHPFVIQLGRIYLDMLNVYKCLSENISAAIQANGEMVTKQPLIRSMRTVKRETLKLISGWVSRSNDPQMVAENFVPPLLDAVLIDYQRNVPAAREPEVLSTMAIIVNKLGGHITAEIPQIFDAVFECTLNMINKDFEEYPEHRTNFFLLLQAVNSHCFPAFLAIPPTQFKLVLDSIIWAFKHTMRNVADTGLQILFTLLQNVAQEEAAAQSFYQTYFCDILQHIFSVVTDTSHTAGLTMHASILAYMFNLVEEGKISTSLNPGNPVNNQIFLQEYVANLLKSAFPHLQDAQVKLFVTGLFSLNQDIPAFKEHLRDFLVQIKEFAGEDTSDLFLEEREIALRQADEEKHKRQMSVPGIFNPHEIPEEMCD

SEQ ID NO: 226 - protein, 632 aa, Homo sapien [sequence omitted]

SEQ ID NO: 227 - protein, 159 aa, Homo sapien
MELHYLTHFQIPDRISTVRRFTLLLSFLLRRLVTLISQQATLLASNEAFKKQAESASEAAKKYMEENDQLKKGAAVDGGKLDVGNAEVKLEEENRSLKADLQKLKDELASTKQKLEKAENQVLAMRKQSEGLTKEYDRLLEEHAKLQAAVDGPMDKKEE

SEQ ID NO: 228 - protein, 313 aa, Homo sapien
MGAEASSSWCPGTALPEERLSVKRASEISGFLGQGSSGEAALDVLTHVLEGAGNKLTSSCGKPSSNRMSLQWTAVATFLYAEVFVVLLLCIPFISPKRWQKIFKSRLVELLVSYGNTFFVVLIVILVLLVIDAVREIRKYDDVTEKVNLQNNPGAMEHFHMKLFRAQRNLYIAGFSLLLSFLLRRLVTLISQQATLLASNEAFKKQAESASEAAKKYMEENDQLKKGAAVDGGKLDVGNAEVKLEEENRSLKADLQKLKDELASTKQKLEKAENQVLAMRKQSEGLTKEYDRLLEEHAKLQAAVDGPMDKKEE

SEQ ID NO: 229 - protein, 301 aa, Homo sapien
MSLQWTAVATFLYAEVFVVLLLCIPFISPKRWQKIFKSRLVELLVSYGNTFFVVLIVILVLLVIDAVREIRKYDDVTEKVNLQNNPGAMEHFHMKLFRAQRNLYIAGFSLLLSFLLRRLVTLISQQATLLASNEAFKKQAESASEAAKKYMEENDQLKKGAAVDGGKLDVGNAEVKLEEENRSLKADLQKLKDELASTKQKLEKAENQVLAMRKQSEGLTKEYDRLLEEHAKLQSPASPSSTSVCALLLPPFPSTAHSSSSRPLSTLSKHITGDLIATRSECVCCHPAWPGQAWHSLGFHA

SEQ ID NO: 230 - protein, 98 aa, Homo sapien
  MISC_FEATURE (2)..(2): X=any amino acid
  MISC_FEATURE (25)..(25): X=any amino acid
  MISC_FEATURE (29)..(29): X=any amino acid
  MISC_FEATURE (68)..(68): X=any amino acid
  MISC_FEATURE (73)..(73): X=any amino acid
IXSPFSYTPPFPPTGGAALSARGIXGPEXEPAAAAVARGKREEAATGEKKRSRHRREVDTQAAAAARXARPPXRPSPRPVHKAARLRKGVRTKGQSLQ

SEQ ID NO: 231 - protein, 130 aa, Homo sapien
  MISC_FEATURE (2)..(2): X=any amino acid
  MISC_FEATURE (4)..(4): X=any amino acid
  MISC_FEATURE (25)..(25): X=any amino acid
  MISC_FEATURE (29)..(29): X=any amino acid
  MISC_FEATURE (67)..(67): X=any amino acid
  MISC_FEATURE (73)..(73): X=any amino acid
  MISC_FEATURE (128)..(128): X=any amino acid
FXPXFPTPPPSPRPEEPLFPRGAFXGPRXSPPPPPSPEGSEKRPRPERKSGVATGEKSTPKQQPPPXRPAHQXARPPAPSTKQPASAKGYERRDKVSNEKSVEDRKEVKEKKEKTKQTISCPGGSEKXKH

SEQ ID NO: 232 - protein, 260 aa, Homo sapien
MDMSLELDIIKLNRSQRGGWGGCRGLRAVCRLPVAGRVWWVLQAAAQVNRGGGPIRNRPGIALRAAVEGGRNRPAPYSRPKQLPDKWQHDLFDSGFGGGAGVETGGKLCVVSNLDIGVSDADIQELFAEFGTLKKAAVHYDRSGRSLGTADVHFERKADALKAMKQYNGVPLDGRPMNIQLVTSQIDAQRRPAQSVNRGGMTRNRGAGGMGELVEAPRRRHCSDGFCGRGRGAGRNSKQQLSAEELDAQLDAYNARMDTS

SEQ ID NO: 233 - protein, 243 aa, Homo sapien
  MISC_FEATURE (28)..(28): X=any amino acid
  MISC_FEATURE (34)..(34): X=any amino acid
  MISC_FEATURE (47)..(47): X=any amino acid
  MISC_FEATURE (54)..(54): X=any amino acid
  MISC_FEATURE (101)..(101): X=any amino acid
TEPEPARRLGRVPGPACRVPAPSCGPRXWGAAAXVNRGGGPSGTGRXSPAAPGXRQEPTGALQQAKTTSRQVAARSFRQWLRRWCRRGDRWETVRGVHLDXGVSDADIQELFAEFGTLKKAAVHYDRSGRSLGTADVHFERKADALKAMKQYNGVPLDGRPMNIQLVTSQIDAQRRPAQSVNRGGMTRNRGAGGIGGDGGTRRGNARILCGRGRGAGRNSKQQLSAEELDAQLDAYNARMDTS

SEQ ID NO: 234 - protein, 428 aa, Homo sapien
MTVAEIKGTTGRTYVGSHAQGRSSKCLKKTKTENPTDPHQTRWTRSGQRLHRGTQSVRQHAWSMHGPKSKNAKHSMDQHTHGQCHVDIVTRCMFICTGQTVTGHHPTSTAAETSMEMINSVRATVAQRESMCHLREAAYTVVPTGIAHHVLALDESKAKLSSDVLTLLIKQYCRESGVRNLQKQVEKVLRKSAYKIVSGEAESVEVTPENLQDFVGKPVFTVERMYDVTPPGVVMGLAWTAMGGSTLFVETSLRRPQDKDAKGDKDGSLEVTGQLGEVMKESARIAYTFARAFLMQHAPANDYLVTSHIHLHVPEGATPKDGPSAGCTIVTALLSLAMGRPVRQNLAMTGEVSLTGKILPVGGIKEKTIAAKRAGVTCIVLPAENKKDFYDLAAFITEGLEVHFVEHYREIFDIAFPDEQAEALAVER

SEQ ID NO: 235 - protein, 287 aa, Homo sapien
  MISC_FEATURE (4)..(5): X=any amino acid
LVPXXSRPCVALDESKAKLSSDVLTLLIKQYCRESGVRNLQKQVEKVLRKSAYKIVSGEAESVEVTPENLQDFVGKPVFTVERMYDVTPPGVVMGLAWTAMGGSTLFVETSLRRPQDKDAKGDKDGSLEVTGQLGEVMKESARIAYTFARAFLMQHAPANDYLVTSHIHLHVPEGATPKDGPSAGCTIVTALLSLAMGRPVRQNLAMTGEVSLTGKILPVGGIKEKTIAAKRAGVTCIVLPAENKKDFYDLAAFITEGLEVHFVEHYREIFDIAFPDEQAEALAVER

SEQ ID NO: 236 - protein, 247 aa, Homo sapien
MSLAILEEVIMWDPRVSRPCLPLGHVATQYFAEQGHASVGWAEYPEEDLKRTMMACGGSNPDQCEGSVSRLCLARCQVFEETQLGGERYNLFDWLPQAKTCTFILRGGTEQFMEETERSLHDAIMIVMRAIKNDSVVAGGGAIEMELSKYLRDYSRTIPGKQQLLIGAYAKALEIIPRQLCDNAGFDATNILNKLRARHAQGGTWYGVDINNEDIADNFEAFVWEPAMVRINALTAASEAAVPDRVL

SEQ ID NO: 237 - protein, 154 aa, Homo sapien
  MISC_FEATURE (35)..(35): X=any amino acid
  MISC_FEATURE (51)..(51): X=any amino acid
LLPQAKTCTFILRGGTEQFMEETERSLHDAIMIVXRAIKNDSVVAGGGAIXMELSKYLRDYSRTIPGKQQLLIGAYAKALEIIPRQLCDNAGFDATNILNKLRARHAQGGTWYGVDINNEDIADNFEAFVWEPAMVRINALTAASEAAVPDRVL

SEQ ID NO: 238 - protein, 269 aa, Homo sapien
  MISC_FEATURE (18)..(18): X=any amino acid
  MISC_FEATURE (27)..(27): X=any amino acid
  MISC_FEATURE (31)..(32): X=any amino acid
  MISC_FEATURE (37)..(37): X=any amino acid
  MISC_FEATURE (41)..(41): X=any amino acid
  MISC_FEATURE (45)..(48): X=any amino acid
  MISC_FEATURE (51)..(51): X=any amino acid
  MISC_FEATURE (55)..(55): X=any amino acid
  MISC_FEATURE (58)..(58): X=any amino acid
  MISC_FEATURE (61)..(61): X=any amino acid
  MISC_FEATURE (69)..(69): X=any amino acid
  MISC_FEATURE (71)..(71): X=any amino acid
  MISC_FEATURE (76)..(76): X=any amino acid
  MISC_FEATURE (89)..(90): X=any amino acid
  MISC_FEATURE (94)..(94): X=any amino acid
  MISC_FEATURE (99)..(100): X=any amino acid
  MISC_FEATURE (114)..(114): X=any amino acid
  MISC_FEATURE (116)..(116): X=any amino acid
  MISC_FEATURE (123)..(123): X=any amino acid
  MISC_FEATURE (126)..(126): X=any amino acid
  MISC_FEATURE (131)..(131): X=any amino acid
  MISC_FEATURE (239)..(239): X=any amino acid
  MISC_FEATURE (263)..(263): X=any amino acid
MAMDLCRQDPECEFYFSXDADAVLTNXQTLXXLIEEXRGVXAPMXXXXGKXWSNXWGXLSXDEYYARSXDXVELVXRKDVGVWNVPYIXXAYVXGGDTXXMELPQRDVFSGSDXDXDMAFCEXFGXKGIFXHLSYQHEFGRLLATSRYDTEHLHPDLWQIFDNPVDWKEQYIHENYSRALEGKDIVEQPCPDVYWFPLLSEQMCDELVAEMEHYGQWSGGRHEDSRLAGGYENVPTVDXPHEAGGVRGPVAAAAADVCGPMTXTCFRFT

SEQ ID NO: 239 - protein, 138 aa, Homo sapien
  MISC_FEATURE (1)..(1): X=any amino acid
  MISC_FEATURE (3)..(4): X=any amino acid
  MISC_FEATURE (9)..(9): X=any amino acid
  MISC_FEATURE (117)..(117): X=any amino acid
XFXXKGIFXHLSYQHEFGRLLATSRYDTEHLHPDLWQIFDNPVDWKEQYIHENYSRALEGKESWSSHARTCTGSHCCQNKCVMSWWQRWSTTASGQAAGMRIQGWLEATRMCPPWTXHMKQVGYEDQWLQLLRTYVGP

SEQ ID NO: 240 - protein, 233 aa, Homo sapien
MKMVAPWTRFYSNSCCLCCHVRTGTILLGVWYLIINAVVLLILLSALADPDQYNFSSSELGGDFEFMDDANMCIAIAISLLMILICAMATYGAYKQRAAWIIPFFCYQIFDFALNMLVAITVLIYPNSIQEYIRQLPPNFPYRDDVMSVNPTCLVLIILLFISIILTFKGYLISCVWNCYRYINGRNSSDVLVYVTSNDTTVLLPPYDDATVNGACQGAPAPYVLPKPSSGRT

SEQ ID NO: 241 - protein, 319 aa, Homo sapien
  MISC_FEATURE (2)..(5): X=any amino acid
VXXXXSPPLQPSPSERRVPTRQKLGALGVSRRQARGRTGERAGSRSGGGAGSSGAAGSRRGGLQARRSTLLKTCARARATAPGAMKMVAPWTRFYSNSCCLCCHVRTGTILLGVWYLIINAVVLLILLSALADPDQYNFSSSELGGDFEFMDDANMCIAIAISLLMILICAMATYGAYKQRAAWIIPFFCYQIFDFALNMLVAITVLIYPNSIQEYIRQLPPNFPYRDDVMSVNPTCLVLIILLFISIILTFKGYLISCVWNCYRYINGRNSSDVLVYVTSNDTTVLLPPYDDATVNGACQGAPALTCCLSLQVGGPEG

SEQ ID NO: 242 - protein, 76 aa, Homo sapien
MDSSGARAGTVCTLHGIHRGHQKPGLFLSRSSNVFSSDSHHLQLVPTQCCHSRLTQVLRPSTSSAARAHLRLDCTI

SEQ ID NO: 243 - protein, 72 aa, Homo sapien
RSGCLIYGLALDAPSGRSVMDSSGARAGTVCTLHGIHRGHQKPGLFLSRSSNASAAIATTYSSSPHSAATAG

SEQ ID NO: 244 - protein, 61 aa, Homo sapien
MGFIEATRNQAFSCPEVPSFSSDSHHLQLVPTQCCHSRLTQVLRPSTSSAARAHLRLDCTI

SEQ ID NO: 245 - protein, 57 aa, Homo sapien
RPPETRPFLVQKFQRFSSDSHHLQLVPTQCCHSRLTQVLRPSTSSAARAHLRLDCTI

SEQ ID NO: 246 - protein, 267 aa, Homo sapien
  MISC_FEATURE (263)..(264): X=any amino acid
  MISC_FEATURE (267)..(267): X=any amino acid
ADETSEKEQQEAIEHIDEVQNEIDRLNEQASEEILKVEQKYNKLRQPFVQKRSELIAKIPTFLGNNICQPSTSVCTALREEDEEALHYLTRVEVTEFEDIKSGYRIDFDFDGNPYFENKVLSKEFHLNESGDPSSKSTEIKWKSGKDLTKRSSQTQNKASRKRQHEEPESFFTWFTDHSDAGADELGEVIKDDIWPNPLQYYLVPDMDDEEGEGEEDDDDDEEEEGLEDIAKNGDEDEGDGMMKIDDEVGGTEQGGLKKKFLXXPPX

SEQ ID NO: 247 - protein, 148 aa, Homo sapien
  MISC_FEATURE (3)..(3): X=any amino acid
  MISC_FEATURE (17)..(17): X=any amino acid
  MISC_FEATURE (134)..(134): X=any amino acid
  MISC_FEATURE (136)..(136): X=any amino acid
  MISC_FEATURE (138)..(139): X=any amino acid
  MISC_FEATURE (141)..(141): X=any amino acid
SFXFDGNPYFENKVLSXEFHLNESGDPSSKSTEIKWKSGKDLTKRSSQTQNKASRKRQHEEPESFFTWFTDHSDAGADELGEVIKDDIWPNPLQYYLVPDMDDEEGEGEEDDDDDEEEEGLEDIAKKGMRMKVXKXKXXMXWEEGQED

SEQ ID NO: 248 - protein, 234 aa, Homo sapien
MKMVAPWTRFYSNSCCLCCHVRTGTILLGVWYLIINAVVLLILLSALADPDQYNFSSSELGGDFEFMDDAKILFNLSADMCIAIAISLLMILICAMATYGAYKQRAAWIIPFFCYQIFDFALNMLVAITVLIYPNSIQEYIRQLPPNFPYRDDVMSVNPTCLVLIILLFISIILTFKGYLISCVWNCYRYINGRNSSDVLVYVTSNDTTVLLPPYDDATVNGAAKEPPPPYVSA

SEQ ID NO: 249 - DNA, 25 bp, Artificial sequence
  Synthetic
ggccaactctttttactccttcatt

SEQ ID NO: 250 - DNA, 22 bp, Artificial sequence
  Synthetic
caggagcatctccgttttcatt

SEQ ID NO: 251 - DNA, 24 bp, Artificial sequence
  Synthetic
tccagtagttgggcagtgctggca

SEQ ID NO: 252 - DNA, 19 bp, Artificial Sequence
  Synthetic
tcggcagacatgtgcattg

SEQ ID NO: 253 - DNA, 21 bp, Artificial sequence
  Synthetic
cgttgcttgtacgctccgtaa

SEQ ID NO: 254 - DNA, 33 bp, Artificial sequence
  Synthetic
cattgcgatttctcttctcatgatcctgatatg
